(19) United States
(12) Patent Application Publication
(10) Pub. No.: US 2022/0177872 A1
(43) Pub. Date: Jun. 9, 2022

(54) DEEP MUTATIONAL EVOLUTION OF BIOMOLECULES

(71) Applicant: Scribe Therapeutics Inc., Alameda, CA (US)

(72) Inventors: Benjamin OAKES, El Cerrito, CA (US); Sean HIGGINS, Alameda, CA (US); Hannah SPINNER, Boston, MA (US); Kian TAYLOR, Atlanta, GA (US); Sarah DENNY, San Francisco, CA (US)

(21) Appl. No.: 17/542,238

(22) Filed: Dec. 3, 2021

Related U.S. Application Data
(63) Continuation of application No. PCT/US2020/036506, filed on Jun. 5, 2020.
(60) Provisional application No. 62/858,718, filed on Jun. 7, 2019.

(51) Int. Cl. C12N 15/10; C12N 9/22; C12N 15/11; C12N 15/63; C12N 15/70; C12N 15/86

(52) U.S. Cl. CPC C12N 15/1058; C12N 15/1086; C12N 9/22; C12N 15/11; C12N 15/635; C12N 2800/101; C12N 15/86; C12N 2310/20; C12N 2800/80; C12N 2740/15043; C12N 15/70

(57) ABSTRACT

Provided herein are methods of developing biomolecule variants (such as proteins, RNA, or DNA) with improved characteristics, for example by developing libraries of variants with alterations to one or more specific monomer locations and screening said libraries for characteristics of interest. These alterations can include deletion, substitution, and insertion, and variants may comprise one alteration or a combination of alterations. Said methods may include further iterative cycles of library construction and evaluation to develop, for example, a biomolecule variant with improved characteristics compared to a reference biomolecule. The methods can also provide information that may be used in the rational design of variants.

### CROSS REFERENCE TO RELATED APPLICATIONS

[0001] This application is a continuation of International Patent Application No. PCT/US2020/036506, filed on Jun. 5, 2020, which claims priority to U.S. provisional patent application number 62,858,718, filed on Jun. 7, 2019, the contents of which are incorporated herein by reference in their entirety.

### INCORPORATION BY REFERENCE OF SEQUENCE LISTING

[0002] This application contains a Sequence listing which has been submitted in ASCII format via EFS-WEB and is hereby incorporated by reference in its entirety. Said ASCII copy, created on Dec. 3, 2021 is named SCRB_012_01_US_SeqList_ST25.txt and is 3.36 MB in size.

### BACKGROUND

[0003] Naturally occurring biomolecules, such as proteins, RNA, and DNA, often exist in a highly specific context and with specific functional requirements, which may not be optimal for other desired applications, such as research, biotechnological, and medical applications. Thus, mutation of biomolecules can be an important tool in modifying biomolecule structure and/or function. Typical modification techniques often target only a subset of the total biomolecule sequence, and also focus on one type of alteration, usually substitution of biomolecule monomers.

[0004] It is believed that insertions and deletions can be fundamental steps along the sequence-function landscape of a given biomolecule, in addition to standard substitution mutations. What is needed in the art are methods of evaluating a broad spectrum of different mutations at varying places along a biomolecule, and ways of combining such mutations, to obtain biomolecule variants with new or improved functionality.

### SUMMARY

[0005] In some aspects, provided herein is a method of selecting an improved biomolecule variant, wherein the biomolecule is a protein, DNA, or RNA, comprising:
[0006] (i) constructing a library comprising a plurality of biomolecule variants;
   [0007] wherein each variant is independently a variant of the same reference biomolecule, wherein each variant comprises an alteration of one or more monomer locations of the reference biomolecule, wherein the monomer is an amino acid of the protein or a ribonucleotide of the RNA or deoxyribonucleotide of the DNA,
   [0008] wherein each alteration of a monomer location is independently selected from the group consisting of substitution of the monomer, deletion of one or more consecutive monomers beginning at the location, and insertion of one or more consecutive monomers adjacent to the location; and
   [0009] wherein the library represents variants comprising alteration of one or more locations for at least 1% of the monomer locations of the reference biomolecule;
[0010] (ii) screening the library of (i);
[0011] (iii) identifying at least a portion of the library of (i) that exhibits one or more improved characteristics compared to the reference biomolecule; and
[0012] (iv) selecting the improved biomolecule variant from the at least a portion of the library, wherein the improved biomolecule variant exhibits one or more improved characteristics compared to the reference biomolecule.

[0013] In some embodiments, the portion of the library identified in step (iii) is screened. In some embodiments, the screen is a different screen than used in (ii), while in other embodiments it is the same screen.

[0014] In other aspects, provided herein is a method of selecting an improved biomolecule variant, wherein the biomolecule is a protein or RNA or DNA, comprising:
[0015] (i) constructing a library comprising a plurality of biomolecule variants;
   [0016] wherein each variant is independently a variant of the same reference biomolecule, wherein each variant comprises an alteration of one or more monomer locations of the reference biomolecule, wherein the monomer is an amino acid of the protein or ribonucleotide of the RNA or deoxyribonucleotide of the DNA,
   [0017] wherein each alteration of a monomer location is independently selected from the group consisting of substitution of the monomer, deletion of one or more consecutive monomers beginning at the location, and insertion of one or more consecutive monomers adjacent to the location; and
   [0018] wherein the library represents variants comprising alteration of one or more locations for at least 1% of the monomer locations of the reference biomolecule;
[0019] (ii) screening the library of (i);
[0020] (iii) identifying at least a portion of the library of (i) that exhibits one or more improved characteristics compared to the reference biomolecule;
[0021] (iv) carrying out one or more additional rounds of library construction and screening to produce a final library, wherein construction of each library comprises:
   [0022] altering one or more additional monomer locations of the identified portion of the previous library to produce a subsequent library of biomolecule variants;
[0023] (v) selecting the improved biomolecule variant from the final library of biomolecule variants, wherein the improved biomolecule variant exhibits one or more improved characteristics compared to the reference biomolecule.

[0024] In some embodiments of the methods provided herein, the library in step (i) comprises biomolecule variants with a single alteration of a single monomer location, biomolecule variants with a single alteration of two monomer locations, and biomolecule variants with a single alteration of three monomer locations, wherein each alteration is independently selected from the group consisting of substitution of the monomer, deletion of one or more consecutive monomers beginning at the location, and insertion of one or more consecutive monomers adjacent to the location. In certain embodiments, the methods comprise one, two, three, or more additional round of library construction and screening. In some embodiments, the improved biomolecule variant comprises an alteration of two or more, five or more, ten or more, or fifteen or more monomer locations of the reference biomolecule.

[0025] In some embodiments, the library in step (i) represents variants comprising a single alteration of a single location for at least 5%, at least 10%, at least 30%, at least 70%, or at least 90% of the total monomer locations. In other embodiments, each variant of the library in step (i) independently comprises alteration of one or more monomer locations, and the totality of the library represents variation of at least 5%, at least 10%, at least 30%, at least 70%, or at least 90% of the total monomer locations of the reference biomolecule.

[0026] In other aspects, provided herein is a method of constructing a library of polynucleotide variants of a reference biomolecule, comprising:
[0027] (a) constructing a polynucleotide that encodes for a variant of the reference biomolecule, wherein the reference biomolecule is a protein or RNA or DNA;
   [0028] wherein the polynucleotide encodes for an alteration of one or more monomer locations of the reference biomolecule, wherein the monomer is an amino acid of the protein or ribonucleotide of the RNA or deoxyribonucleotide of the DNA, and
   [0029] wherein each alteration of a monomer location is independently selected from the group consisting of substitution of the monomer, deletion of one or more consecutive monomers beginning at the location, and insertion of one or more consecutive monomers adjacent to the location; and
[0030] (b) repeating the polynucleotide construction of (a) a sufficient number of times such that the library of polynucleotide represents variants comprising a single alteration of a single location for at least 1% of the monomer locations of the biomolecule.

[0031] In still further aspects, provided herein is a polynucleotide variant library, comprising polynucleotide variants of a reference biomolecule, comprising:
[0032] a plurality of polynucleotides that independently encode for a variant of the reference biomolecule, wherein the reference biomolecule is a protein or RNA or DNA;
   [0033] wherein each polynucleotide independently encodes an alteration of one or more monomer locations of the reference biomolecule, wherein the monomer is an amino acid of the protein or ribonucleotide of the RNA or deoxyribonucleotide of the DNA, and
   [0034] wherein each alteration of a monomer location is independently selected from the group consisting of substitution of the monomer, deletion of one or more consecutive monomers beginning at the location, and insertion of one or more consecutive monomers adjacent to the location; and
   [0035] wherein the library of polynucleotides represents variants comprising a single alteration of a single location for at least 1% of the monomer locations.

[0036] In some embodiments of the methods provided herein, the library of polynucleotides represents variants comprising a single alteration of a single location for at least 5%, at least 10%, at least 30%, at least 70%, or at least 90% of the total monomer locations. In other embodiments, each variant comprises alteration of one or more locations, and the totality of the library represents variation of at least 5%, at least 10%, at least 30%, at least 70%, or at least 90% of the total monomer locations of the reference biomolecule.

[0037] In some embodiments of the methods provided herein, the library of polynucleotides represents variants comprising substitution of the monomer, variants comprising deletion of one or more monomers beginning at the location, and variants comprising insertion of one or more new monomers adjacent to the location for at least 10% of monomer locations. In some embodiments, for each inserted new monomer, the library of polynucleotides represents each naturally occurring monomer possibility.

[0038] In some embodiments, the library of polynucleotides represents variants for each of the following alterations for at least 80% of the monomer locations:
[0039] deletion of each of one, two, three, and four consecutive monomers,
[0040] insertion of each of one, two three, and four consecutive monomers, and
[0041] substitution of the same monomer with each of the other naturally occurring monomers.

[0042] In still further aspects, provided herein is a vector library comprising a plurality of vectors, wherein each vector independently comprises one polynucleotide of a polynucleotide variant library as described herein, and wherein the vector library collectively comprises the variant library. In some embodiments, vectors are bacterial plasmids. In certain embodiments, the vectors are constructed with plasmid recombineering.

[0043] In still further aspects, provided herein is a method of selecting a biomolecule variant, comprising:
[0044] producing a library of reference biomolecule variants from a polynucleotide variant library as described herein, or a vector library as described herein;
[0045] screening the library of reference biomolecule variants for one or more functional characteristics; and
[0046] selecting a biomolecule variant from the library of reference biomolecule variants.

[0047] In some embodiments, the one or more functional characteristics is selected from the group consisting of binding, activity, editing efficiency, editing specificity, and off-target cleavage. In certain embodiments, the screening comprises ranking the one or more functional characteristics for each of at least a portion of the biomolecule variants. In still further embodiments, the screening comprises deep sequencing of at least a portion of the plurality of polynucleotides.

[0048] In yet further aspects, provided herein is a biomolecule variant selected by any of the methods described herein. In some embodiments, the biomolecule variant has one or more improved functional characteristics compared to the reference biomolecule. In certain embodiments, one or more improved functional characteristics is selected from the group consisting of binding, activity, editing efficiency, editing specificity, and off-target cleavage. In some embodiments, the improvement is at least 1.1 fold, at least 1.5 fold, at least 10 fold, or between 1.5 to 100 fold.

[0049] In other aspects, provided herein is a library of variant oligonucleotides, wherein:
[0050] each variant oligonucleotide independently encodes an alteration of one or more sequential monomer locations of a reference biomolecule, wherein:
   [0051] the reference biomolecule is a protein or RNA or DNA,
   [0052] the one or more monomers are one or more amino acids of the protein or ribonucleotides of the RNA or deoxyribonucleotides of the DNA, and
   [0053] wherein each alteration of a monomer location is independently selected from the group consisting of substitution of the monomer, deletion of one or more consecutive monomers beginning at the location, and insertion of one or more consecutive monomers adjacent to the location;
[0054] each variant oligonucleotide comprises a pair of homology arms flanking the encoded alteration, wherein the homology arms are homologous to the reference biomolecule sequences flanking the corresponding monomer location alteration, and wherein each homology arm independently comprises between 10 to 100 nucleotides; and
[0055] the library of variant oligonucleotides represents alteration of a single monomer for at least 80% of monomer locations.

[0056] In some embodiments, each variant oligonucleotide independently encodes an alteration of one monomer location of the reference biomolecule.

[0057] In yet other aspects, provided herein is a library comprising a plurality of RNA variants, wherein each variant is independently a variant of the same reference RNA, and each variant comprises a point mutation, deletion, or insertion at one ribonucleotide location of the reference RNA sequence; wherein the library represents variants comprising the single alteration of a single location, for at least 1% of the ribonucleotide locations of the reference RNA sequence. In some embodiments, the library represents variants comprising the single alteration of a single location, for at least 5%, at least 10%, at least 30%, at least 50%, or at least 80% of the ribonucleotide locations of the reference RNA sequence. In other embodiments, each variant comprises alteration of one or more ribonucleotide locations, and the totality of the library represents variation of at least 5%, at least 10%, at least 30%, at least 70%, or at least 90% of the total ribonucleotide locations of the reference RNA sequence.

[0058] In further aspects, provided herein is a library comprising a plurality of protein variants, wherein each variant is independently a variant of the same reference protein, and each variant comprises an amino acid substitution, deletion, or insertion at one amino acid location of the reference protein sequence; wherein the library represents variants comprising the single alteration of a single location, for at least 1% of the amino acids of the reference protein sequence. In some embodiments, the library represents variants comprising the single alteration of a single location, for at least 5%, at least 10%, at least 30%, at least 50%, or at least 80% of the amino acids of the reference protein sequence. In other embodiments, each variant comprises alteration of one or more amino acid locations, and the totality of the library represents variation of at least 5%, at least 10%, at least 30%, at least 70%, or at least 90% of the total amino acid locations of the reference protein.

[0059] In still further aspects, provided herein is a library comprising a plurality of DNA variants, wherein each variant is independently a variant of the same reference DNA, and each variant comprises a point mutation, deletion, or insertion at one deoxyribonucleotide location of the reference DNA sequence; wherein the library represents variants comprising the single alteration of a single location, for at least 1% of the deoxyribonucleotide locations of the reference DNA sequence. In some embodiments, the library represents variants comprising the single alteration of a single location, for at least 5%, at least 10%, at least 30%, at least 50%, or at least 80% of the deoxyribonucleotide locations of the reference DNA sequence. In other embodiments, each variant comprises alteration of one or more deoxyribonucleotide locations, and the totality of the library represents variation of at least 5%, at least 10%, at least 30%, at least 70%, or at least 90% of the total deoxyribonucleotide locations of the reference DNA.

[0060] In certain embodiments of the methods, compositions, and libraries provided herein, the reference biomolecule is a CRISPR associated protein. In certain embodiments, the CRISPR associated protein is CasX. In some embodiments, the one or more improved characteristics are independently selected from the group consisting of improved folding of the variant, improved binding affinity to the guide RNA, improved binding affinity to a target DNA, altered binding affinity to one or more PAM sequences, improved unwinding of a target DNA, increased activity, improved editing efficiency, improved editing specificity, increased activity of the nuclease, increased target strand loading for double strand cleavage, decreased target strand loading for single strand nicking, decreased off-target cleavage, decreased off-target binding/nicking, improved binding of the non-target strand of a DNA, improved protein stability, improved protein:guide-RNA complex stability, improved protein solubility, improved protein:guide-NA complex stability, improved protein yield, increased collateral activity, and decreased collateral activity.

[0061] In other embodiments of the methods, compositions, and libraries provided herein, the reference biomolecule is a CRISPR guide RNA. In some embodiments, the CRISPR guide RNA is a guide RNA that binds to CasX. In some embodiments, the one or more improved characteristics are independently selected from the group consisting of improved stability, improved solubility, improved resistance to nuclease activity, improved binding affinity to a reference CRISPR associated protein, improved binding affinity to a target DNA, improved gene editing, and improved specificity.

### DESCRIPTION OF THE FIGURES

[0062] The present application can be understood by reference to the following description taken in conjunction with the accompanying figures.

[0063] FIG. 1 is a diagram showing an exemplary method of making CasX protein and guide RNA variants of the disclosure using Deep Mutational Evolution (DME). In some exemplary embodiments, DME builds and tests nearly every possible mutation, insertion and deletion in a biomolecule and combinations/multiples thereof, and provides a near comprehensive and unbiased assessment of the fitness landscape of a biomolecule and paths in sequence space towards desired outcomes. As described herein, DME can be applied to both CasX protein and guide RNA.

[0064] FIG. 2 is a diagram and an example fluorescence activated cell sorting (FACS) plot illustrating an exemplary method for assaying the effectiveness of a reference CasX protein or single guide RNA (sgRNA), or variants thereof. A reporter (e.g. GFP reporter) coupled to a gRNA target sequence, complementary to the gRNA spacer, is integrated into a reporter cell line. Cells are transformed or transfected with a CasX protein and/or sgRNA variant, with the spacer motif of the sgRNA complementary to and targeting the gRNA target sequence of the reporter. Ability of the CasX:sgRNA ribonucleoprotein complex to cleave the target sequence is assayed by FACS. Cells that lose reporter expression indicate occurrence of CasX:sgRNA ribonucleoprotein complex-mediated cleavage and indel formation.

[0065] FIG. 3A and FIG. 3B are exemplary heat maps showing the results of an exemplary DME mutagenesis of the reference sgRNA encoded by SEQ ID NO: 5, as described in Example 3. FIG. 3A shows the effect of single base pair (single base) substitutions, double base pair (double base) substitutions, single base pair insertions, single base pair deletions, and a single base pair deletion plus at single base pair substitution at each position of the reference sgRNA shown at top. FIG. 3B shows the effect of double base pair insertions and a single base pair insertion plus a single base pair substitution at each position of the improved reference sgRNA. The reference sgRNA sequence is UACUGGCGCUUUUAUCUCAUUACUUUGAGAGCCAUCACCAGCGACUAUGUCGUA UGGGUAAAGCGCUUAUUUAUCGGAGAGAAAUCCGAUAAAUAAGAAGCAUCAAAG (SEQ ID NO: 5) and is shown at the top of FIG. 3A and bottom of FIG. 3B. In FIG. 3A and FIG. 3B, Log₂ fold enrichment of the variant in the DME library relative to the reference CasX sgRNA following selection is indicated in grayscale. The results show regions of the reference sgRNA that should not be mutated and key regions that should be targeted for mutagenesis.

[0066] FIG. 4A shows the results of exemplary DME experiments using a reference sgRNA, as described in Example 3. The improved reference sgNA (an sgRNA) with a sequence of SEQ ID NO: 5 is shown at top, and Log₂ fold enrichment of the variant in the DME library relative to the reference sgRNA following selection is indicated in grayscale. Enrichment is a proxy for activity, where greater enrichment is a more active molecule. The heat map shows an exemplary DME experiment showing four replicates of a library where every base pair in the reference sgRNA has been substituted with every possible alternative base pair.

[0067] FIG. 4B is a series of 8 plots that compare biological replicates of different DME libraries. The Log₂ fold enrichment of individual variants relative to the reference sgRNA sequence for pairs of DME replicates are plotted against each other. Shown are plots for single deletion, single insertion and single substitution DME experiments, as well as wild type controls, and the plots indicate that there is a good amount of agreement for each replicate.

[0068] FIG. 4C is a heat map of an exemplary DME experiment showing four replicates of a library where every location in the reference sgRNA has undergone a single base pair insertion. The DME experiment used a reference sgRNA of SEQ ID NO: 5 (at top), and was performed as described in Example 3. Log₂ fold enrichment of the variant in the DME library relative to the reference sgRNA following selection is indicated in grayscale.

[0069] FIGS. 5A-5E are a series of plots showing that sgNA variants can improve gene editing by greater than two fold in an EGFP disruption assay, as described in Examples 2 and 3. Editing was measured by indel formation and GFP disruption in HEK293 cells carrying a GFP reporter. FIG. 5A shows the fold change in editing efficiency of a CasX sgRNA reference of SEQ ID NO: 4 and a variant of the reference which has a sequence of SEQ ID NO: 5, across 10 targets. When averaged across 10 targets, the editing efficiency of sgRNA SEQ ID NO: 5 improved 176% compared to SEQ ID NO: 4. FIG. 5B shows that further improvement of the sgRNA scaffold of SEQ ID NO: 5 is possible by swapping the extended stem loop sequence for additional sequences to generate the scaffolds whose sequences are shown in Table 3. Fold change in editing efficiency is shown on the Y-axis. FIG. 5C is a plot showing the fold improvement of sgNA variants (including SEQ ID NO: 17) generated by DME mutations normalized to SEQ ID NO: 5 as the CasX reference sgRNA. FIG. 5D is a plot showing the fold improvement of sgNA variants of sequences listed in Table 3, which were generated by appending ribozyme sequences to the reference sgRNA sequence, normalized to SEQ ID NO: 5 as the CasX reference sgRNA. FIG. 5E is a plot showing the fold improvement normalized to the SEQ ID NO: 5 reference sgRNA of variants created by both combining (stacking) scaffold stem mutations showing improved cleavage, DME mutations showing improved cleavage, and using ribozyme appendages showing improved cleavage. The resulting sgNA variants yield 2 fold or greater improvement in cleavage compared to SEQ ID NO: 5 in this assay. EGFP editing assays were performed with spacer target sequences of E6 and E7.

[0070] FIG. 6 shows a Hepatitis Delta Virus (HDV) genomic ribozyme used in exemplary gNA variants (SEQ ID NOs: 18-22, from top to bottom and left to right).

[0071] FIGS. 7A-7I are a series of heat maps showing the effect of single amino acid substitutions, single amino acid insertions, and deletions at each amino acid position in a reference CasX protein of SEQ ID NO: 2, as described in Example 4. Data were generated by a DME assay run at 37° C. The Y-axis shows each possible substitution or insertion (from top to bottom: R, H, K, D, E, S, T, N, Q, C, G, P, A, I, L, M, F, W, Y, V; boxes indicate the amino acid identity of the reference protein), the X-axis shows the amino acid position in the reference CasX protein. Grayscale indicates log₂ fold enrichment of the CasX variant protein relative to the reference CasX protein of SEQ ID NO: 2 in a DME library following enrichment. As used herein, “enrichment” is a proxy for activity, where greater enrichment is a more active molecule. (*)s indicate active sites. FIGS. 7A-7D show the effect of single amino acid substitutions. FIGS. 7E-7H show the effect of single amino acid insertions. FIG. 7I shows the effect of single amino acid deletions.

[0072] FIGS. 8A-8C are a series of heat maps showing the effect of single amino acid substitutions, single amino acid insertions and deletions at each amino acid position in a reference CasX protein of SEQ ID NO: 2, as described in Example 4. Data were generated by a DME assay run at 45° C. FIG. 8A shows the effect of single amino acid substitutions. FIG. 8B shows the effect of single amino acid insertions. FIG. 8C shows the effect of single amino acid deletions. For all of FIGS. 8A-8C, The Y-axis shows each possible substitution or insertion (from top to bottom: R, H, K, D, E, S, T, N, Q, C, G, P, A, 1, L, M, F, W, Y, V; boxes indicate the amino acid identity of the reference protein), the X-axis shows the amino acid position in the reference CasX protein. Grayscale indicates log₂ fold enrichment of the CasX variant protein relative to the reference CasX protein of SEQ ID NO: 2 in a DME library following enrichment. Enrichment may be thought of as a proxy for activity, where greater enrichment is a more active molecule. (*)s indicate active sites. Running this assay at 45° C. enriches for different variants than running the same assay at 37° C. (see FIGS. 7A-7I), thereby indicating which amino acid residues and changes are important for thermostability and folding.

[0073] FIG. 9 shows a survey of the comprehensive mutational landscape of all single mutations of a reference CasX protein of SEQ ID NO: 2, as described in Example 4. On the Y-axis, fold enrichment of CasX variants relative to the reference CasX protein for single substitutions (top), single insertions (middle) or single deletions (bottom). On the X-axis, amino acid position in the reference CasX protein. Key regions that yield improved CasX variants are the initial helix region and regions in the RuvC domain bordering the target strand loading (TLS) domain, as well as others.

[0074] FIG. 10 is a plot showing that the evaluated CasX variant proteins improved editing greater than three-fold relative to a reference CasX protein in the EGFP disruption assay, as described in Example 5. CasX proteins were tested for their ability to cleave an EGFP reporter at 2 different target sites in human HEK293 cells, and the normalized improvement in genome editing at these sites over the basic reference CasX protein of SEQ ID NO: 2 is shown. Variants, from left to right (indicated by the amino acid substitution, insertion or deletion at the given residue number) are: Y789T, [P793], Y789D, T72S, I546V, E552A, A636D, F536S, A708K, Y797L, L792G, A739V, G791M, \hat{ }G661, A788W, K390R, A751S, E385A, \hat{ }P696, \hat{ }M773, G695H, \hat{ }AS793, \hat{ }AS795, C477R, C477K, C479A, C479L, I55F, K210R, C233S, D231N, Q338E, Q338R, L379R, K390R, L481Q, F495S, D600N, T886K, A739V, K460N, I199F, G492P, T1531, R591I, \hat{ }AS795, \hat{ }AS796, \hat{ }L889, E121D, S270W, E712Q, K942Q, E552K, K25Q, N47D, \hat{ }T696, L685I, N880D, Q102R, M734K, A724S, T704K, P224K, K25R, M29E, H152D, S219R, E475K, G226R, A377K, E480K, K416E, H164R, K767R, I7F, M29R, H435R, E385Q, E385K, I279F, D489S, D732N, A739T, W885R, E53K, A238T, P283Q, E292K, Q628E, R388Q, G791M, L792K, L792E, M779N, G27D, K955R, S867R, R693I, F189Y, V635M, F399L, E498K, E386S, V254G, P793S, K188E, QT945KI, T620P, T946P, TT949PP, N952T, K682E, K975R, L212P, E292R, 1303K, C349E, E385P, E386N, D387K, L404K, E466H, C477Q, C477H, C479A, D659H, T806V, K808S, \hat{ }AS797, V959M, K975Q, W974G, A708Q, V711K, D733T, L742W, V747K, F755M, M771A, M771Q, W782Q, G791F, L792D, L792K, P793Q, P793G, Q804A, Y966N, Y723N, Y857R, S890R, S932M, L897M, R624G, S603G, N737S, L307K, I658V \hat{ }PT688, \hat{ }SA794, S877R, N580T, V335G, T620S, W345G, T280S, L406P, A612D, A751S, E386R, V351M, K210N, D40A, E773G, H207L, T62A, T287P, T832A, A893S, \hat{ }V14, \hat{ }AG13, R11V, R12N, R13H, \hat{ }Y13, R12L, \hat{ }Q13,V15S, \hat{ }D17. \hat{ } indicate insertions, [ ] indicate deletions.

[0075] FIG. 11 is a plot showing individual beneficial mutations can be combined (sometimes referred to as “stacked”) for even greater improvements in gene editing activity, as described in Example 5. CasX proteins were tested for their ability to cleave at 2 different target sites in human HEK293 cells using the E6 and E7 spacers targeting an EGFP reporter, as described in Example 5. The variants, from left to right, are: S794R+Y797L, K416E+A708K, A708K+[P793], [P793]+P793AS, Q367K+I425S, A708K+[P793]+A793V, Q338R+A339E, Q338R+A339K, S507G+G508R, L379R+A708K+[P793], C477K+A708K+[P793], L379R+C477K+A708K+[P793], L379R+A708K+[P793]+A739V, C477K+A708K+[P793]+A739V, L379R+C477K+A708K+[P793]+A739V, L379R+A708K+[P793]+M779N, L379R+A708K+[P793]+M771N, L379R+A708K+[P793]+D489S, L379R+A708K+[P793]+A739T, L379R+A708K+[P793]+D732N, L379R+A708K+[P793]+G791M, L379R+A708K+[P793]+Y797L, L379R+C477K+A708K+[P793]+M779N, L379R+C477K+A708K+[P793]+M771N, L379R+C477K+A708K+[P793]+D489S, L379R+C477K+A708K+[P793]+A739T, L379R+C477K+A708K+[P793]+D732N, L379R+C477K+A708K+[P793]+G791M, L379R+C477K+A708K+[P793]+Y797L, L379R+C477K+A708K+[P793]+T620P, A708K+[P793]+E386S, E386R+F399L+[P793] and R4581I+A739V of the reference CasX protein of SEQ ID NO: 2. [ ] refer to deleted amino acid residues at the specified position of SEQ ID NO: 2.

[0076] FIGS. 12A-12B are a pair of plots showing that CasX protein and sgNA variants when combined, can improve activity more than 6-fold relative to a reference sgRNA and reference CasX protein pair. sgNA:protein pairs were assayed for their ability to cleave a GFP reporter in HEK293 cells, as described in Example 5. On the Y-axis, the fraction of cells in which expression of the GFP reporter was disrupted by CasX mediated gene editing are shown. FIG. 12A shows CasX protein and sgNAs that were assayed with the E6 spacer targeting GFP. FIG. 12B shows CasX protein and sgNAs that were assayed with the E7 spacer targeting GFP. iGFP stands for “inducible GFP.”

[0077] FIGS. 13A-13C show that making and screening DME libraries has allowed for generation and identification of variants that exhibit a 1 to 81-fold improvement in editing efficiency, as described in Examples 1 and 3. FIG. 13A shows an RFP+ and GFP+ reporter in E. coli cells assayed for CRISPR interference repression of GFP with a reference nuclease dead CasX protein and sgNA. FIG. 13B shows the same reporter cells assayed for GFP repression with nuclease dead CasX variants screened from a DME library. FIG. 13C shows improved editing efficiency of a selected CasX protein and sgNA variant compared to the reference with 5 spacers targeting the endogenous B2M locus in HEK 293 human cells. The Y axis shows disruption in B2M staining by HLA1 antibody indicating gene disruption via CasX editing and indel formation. The improved CasX variants improved editing of this locus up to 81-fold over the reference in the case of guide spacer #43. CasX pairs with the reference sgRNA: protein pair of SEQ ID NO: 5 and SEQ ID NO: 2; and CasX variant protein of L379R+A708K+[P793] of SEQ ID NO: 2, assayed with the sgNA variant with a truncated stem loop and a T10C substitution, which is encoded by a sequence of TACTGGCGCCTTTATCTCATTACTTTGAGAGCCATCACCAGCGACTATGTCGTATGG GTAAAGCGCTTACGGACTTCGGTCCGTAAGAAGCATCAAAG (SEQ ID 23), are shown. The following spacer sequences were used: #9: GTGTAGTACAAGAGATAGAA (SEQ ID NO: 24); #14: TGAAGCTGACAGCATTCGGG (SEQ ID NO: 25), #20: tagATCGAGACATGTAAGCA (SEQ ID NO: 26); #37: GGCCGAGATGTCTCGCTCCG (SEQ ID NO: 27) and #43: AGGCCAGAAAGAGAGAGTAG (SEQ ID NO: 28).

[0078] FIGS. 14A-14F are a series of structural models of a prototypic CasX protein showing the location of mutations in CasX variant proteins of the disclosure which exhibit improved activity, as described in Example 14. FIG. 14A shows a deletion of P at 793 of SEQ ID NO: 2, with a deletion in a loop that may affect folding. FIG. 14B shows a replacement of Alanine (A) by Lysine (K) at position 708 of SEQ ID NO: 2. This mutation is facing the gNA 5′ end plus a salt bridge to the gNA. FIG. 14C shows a replacement of Cysteine (C) by Lysine (K) at position 477 of SEQ ID NO: 2. This mutation is facing the gNA. There is salt bridge to the gNAbb (gNA phosphase backbone) at approximately base 14 that may be affected. This mutation removes a surface exposed cysteine. FIG. 14D shows a replacement of Leucine (L) with Arginine (R) at position 379 of SEQ ID NO: 2. There is a salt bridge to the target DNAbb (DNA phosphate backbone) towards base pairs 22-23 that may be affected. FIG. 14E shows one view of a combination of the deletion of P at 793 and the A708K substitution. FIG. 14F shows an alternate view, that shows that the effects of individual mutants are additive and single mutants can be combined (stacked) for even greater improvements. Arrows indicate the locations of mutations in FIGS. 14E-14F.

[0079] FIG. 15 is a plot showing the identification of optimal Planctomycetes CasX PAM and spacers for genes of interest, as described in Example 19. On the Y-axis, percent GFP negative cells, indicating cleavage of a GFP reporter, is shown. On the X-axis, different PAM sequences and spacers: ATC PAM, CTC PAM and TTC PAM. GTC, TTT and CTT PAMs were also tested and showed no activity.

[0080] FIG. 16 is a plot showing that improved CasX variants generated by DME edit both canonical and non-canonical PAMs more efficiently than reference CasX proteins, as described in Example 19. The Y-axis shows the average fold improvement in editing relative to a reference sgRNA: protein pair (SEQ ID NO:2, SEQ ID NO: 5) with 2 targets, N=6. Protein variants, from left to right for each set of bars were: A708K+[P793]+A739V; L379R+A708K+[P793]; C477K+A708K+[P793]; L379R+C477K+A708K+[P793]; L379R+A708K+[P793]+A739V; C477K+A708K+[P793]+A739V; and L379R+C477K+A708K+[P793]+A739V. Reference CasX and protein variants were assayed with a reference sgRNA scaffold of SEQ ID NO: 5 with DNA encoding spacer sequences of, from left to right, E6 (TGTGGTCGGGGTAGCGGCTG; SEQ ID NO: 29) with a TTC PAM; E7 (TCAAGTCCGCCATGCCCGAA; SEQ ID NO: 30) with a TTC PAM; GFP8 (CCAGGGTGTCGCCCTCGAAC; SEQ ID NO: 31) with a TTC PAM; B1 (TGACCACCCTGACCTACGGC; SEQ ID NO: 32) with a CTC PAM and A7 (TGGGGCACAAGCTGGAGTAC; SEQ ID NO: 33) with an ATC PAM.

[0081] FIGS. 17A-17F are a series of plots showing that a reference CasX protein and a reference sgRNA scaffold pair is highly specific for the target sequence, as described in Example 14. FIG. 17A and FIG. 17D, Streptococcus pyogenes Cas9 (SpyCas9) was assayed with two different gNA spacers and a 5′ PAM site (SEQ ID NOs: 34-65) and (SEQ ID NOs: 136-166) for its ability to edit templates with a target sequence complementary to the spacer sequence (arrow), or with 1, 2, 3 or 4 mutations in the target sequence relative to the spacer sequence. FIG. 17B and FIG. 17E, Staphylococcus aureus Cas9 (SauCas9) was assayed with two different gNA spacers and a 5′ PAM site (SEQ ID NOs: 66-103) and (SEQ ID NOs: 167-204) for its ability to edit templates with a target sequence complementary to the spacer sequence (arrow), or with 1, 2, 3 or 4 mutations in the target sequence relative to the spacer sequence. FIG. 17C and FIG. 17F, the reference Plm CasX protein and sgNA scaffold pair was assayed with two different gNA spacers and a 3′ PAM site (SEQ ID NOs: 104-135) and (SEQ ID NOs: 205-236) for its ability to edit templates with a target sequence complementary to the spacer sequence (arrow), or with 1, 2, 3 or 4 mutations in the target sequence relative to the spacer sequence. In all of FIG. 17A-17F, the X-axis shows the fraction of cells where gene editing at the target sequence occurred.

[0082] FIG. 18 illustrates a scaffold stem loop of an exemplary reference sgRNA of the disclosure (SEQ ID NO: 237).

[0083] FIG. 19 illustrates an extended stem loop sequence of an exemplary reference sgRNA of the disclosure (SEQ ID NO: 238).

[0084] FIGS. 20A-20B are a pair of plots that demonstrate that specific subsets of changes discovered by DME of the CasX are more likely to predict improvements of activity, as described in Example 16. The plots represent data from the experiments described in FIGS. 7A-7I and FIGS. 8A-8C. FIG. 20A shows that changing amino acids within a distance of 10 Angstroms (A) of the guide RNA to hydrophobic residues (A, V, I, L, M, F, Y, W) results in a significantly less active protein. FIG. 20B demonstrates that, in contrast, changing a residue within 10 A of the RNA to a positively charged amino acid (R, H, K) is likely to improve activity.

[0085] FIG. 21 illustrates an alignment of two reference CasX protein sequences (SEQ ID NO: 1, top; SEQ ID NO: 2, bottom), with domains annotated.

[0086] FIG. 22 illustrates the domain organization of a reference CasX protein of SEQ ID NO: 1. The domains have the following coordinates: non-target strand binding (NTSB) domain: amino acids 101-191; Helical I domain: amino acids 57-100 and 192-332; Helical II domain: 333-509; oligonucleotide binding domain (OBD): amino acids 1-56 and 510-660; RuvC DNA cleavage domain (RuvC): amino acids 551-824 and 935-986; target strand loading (TSL) domain: amino acids 825-934. Not that the Helical I, OBD and RuvC domains are non-contiguous.

[0087] FIG. 23 illustrates an alignment of two CasX reference sgRNA scaffolds SEQ ID NO: 5 (top) and SEQ ID NO: 4 (bottom).

[0088] FIG. 24 is a graph of the results of an assay for the quantification of active fractions of RNP formed by sgRNA174 and the CasX variants 119 and 457, as described in Example 12. Equimolar amounts of RNP and target were co-incubated and the amount of cleaved target was determined at the indicated timepoints. Mean and standard deviation of three independent replicates are shown for each timepoint. The biphasic fit of the combined replicates is shown. “2” refers to the reference CasX protein of SEQ ID NO: 2.

[0089] FIG. 25 is a graph of the results of an assay for quantification of active fractions of RNP formed by CasX2 and reference guide 2, and the modified sgRNA guides 32, 64, and 174, as described in Example 12. Equimolar amounts of RNP and target were co-incubated and the amount of cleaved target was determined at the indicated timepoints. Mean and standard deviation of three independent replicates are shown for each timepoint. The biphasic fit of the combined replicates is shown. “2” refers to reference gRNAs SEQ ID NO: 5, respectively, and the identifying number of modified sgRNAs are indicated in Table 3.

[0090] FIG. 26 is a graph of the results of an assay for quantification of cleavage rates of RNP formed by sgRNA174 and the CasX variants 119 and 457, as described in Example 12. Target DNA was incubated with a 20-fold excess of the indicated RNP and the amount of cleaved target was determined at the indicated time points. Mean and standard deviation of three independent replicates are shown for each timepoint. The monophasic fit of the combined replicates is shown.

[0091] FIG. 27 is a graph of the results of an assay for quantification of cleavage rates of RNP formed by CasX2 and the sgRNA guide variants 2, 32, 64 and 174, as described in Example 12. Target DNA was incubated with a 20-fold excess of the indicated RNP and the amount of cleaved target was determined at the indicated time points. Mean and standard deviation of three independent replicates are shown for each timepoint. The monophasic fit of the combined replicates is shown.

[0092] FIG. 28 is a graph of the results of an assay for quantification of initial velocities of RNP formed by CasX2 and the sgRNA guide variants 2, 32, 64 and 174, as described in Example 12. The first two time-points of the previous cleavage experiment were fit with a linear model to determine the initial cleavage velocity.

[0093] FIG. 29 shows the results of an editing assay of 6 target genes in HEK293T cells, as described in Example 15. Each dot represents results using an individual spacer.

[0094] FIG. 30 shows the results of an editing assay of 6 target genes in HEK293T cells, with individual bars representing the results obtained with individual spacers, as described in Example 15.

[0095] FIG. 31 shows the results of an editing assay of 4 target genes in HEK293T cells, as described in Example 15. Each dot represents results using an individual spacer utilizing a CTC PAM.

[0096] FIG. 32 is a schematics showing the steps of Deep Mutational Evolution used to create libraries of genes encoding CasX variants, as described in Example 16. The pSTX1 backbone is minimal, composed of only a high-copy number origin and KanR resistance gene, making it compatible with the recombineering E. coli strain EcNR2. pSTX2 is a BsmbI destination plasmid for aTc-inducible expression in E. coli.

[0097] FIG. 33 are dot plot graphs showing the results of CRISPRi screens for mutations in libraries D1, D2, and D3, as described in Example 16. In the absence of CRISPRi, E. coli constitutively express both GFP and RFP, resulting in intense fluorescence in both wavelengths, represented by dots in the upper-right region of the plot. CasX proteins resulting in CRISPRi of GFP can reduce green fluorescence by >10-fold, while leaving red fluorescence unaltered, and these cells fall within the indicated Sort Gate 1. The total fraction of cells exhibiting CRISPRi is indicated.

[0098] FIG. 34 are photographs of colonies grown in the ccdB assay, as described in Example 16. 10-fold dilutions were assayed in the presence of glucose or arabinose to induce expression of the ccdB toxin, resulting in approximately a 1000-fold difference between functional and nonfunctional proteins. When grown in liquid culture, the resolving power was approximately 10,000-fold, as seen on the right-hand side.

[0099] FIG. 35 is a graph of HEK iGFP genome editing efficiency testing CasX variants with sgRNA 2 (SEQ ID NO: 5), with appropriate spacers, with data expressed as fold-improvement over the wild-type CasX protein (SEQ ID NO: 2) in the HEK iGFP editing assay, as described in Example 16. Single mutations are shown at the top, with groups of mutations shown at the bottom of the graph. Error bars combine internal measurement error (SD) and inter-experimental measurement error (SD across replicate experiments for those variants tested more than once), in at least triplicate assays.

[0100] FIG. 36 is a scatterplot showing results of the SOD1-GFP reporter assay for CasX variants with sgRNA scaffold 2 utilizing two different spacers for GFP, as described in Example 16.

[0101] FIG. 37 is a graph showing the results of the HEK293 iGFP genome editing assay assessing editing across four different PAM sequences comparing wild-type CasX (SEQ ID NO:2) and CasX variant 119; both utilizing sgRNA scaffold 1 (SEQ ID NO:4), with spacers utilizing four different PAM sequences, as described in Example 16.

[0102] FIG. 38 is a graph showing the results of genome editing activity of CasX variant 119 and sgRNA 174 compared to wild-type CasX 2 and guide scaffold 1 in the iGFP lipofection assay utilizing two different spacers, as described in Example 16.

[0103] FIG. 39 is a graph showing the results of genome editing activity of CasX variant 119 and sgRNA 174 compared to wild-type CasX and guide in the iGFP lentiviral transduction assay, as described in Example 16.

[0104] FIG. 40 is a graph showing the results of genome editing in the more stringent lentiviral assay to compare the editing activity of four CasX variants (119, 438, 488 and 491) and the optimized sgNA 174 and two different spacers, as described in Example 16. The results show the step-wise improvement in editing efficiency achieved by the additional modifications and domain swaps introduced to the starting-point 119 variant.

[0105] FIGS. 41A-41B show the results of NGS analyses of the libraries of sgRNA, as described in Example 17. FIG. 41A shows the distribution of substitutions, deletions and insertions. FIG. 41B is a scatterplot showing the high reproducibility of variant representation in two separate library pools after the CRISPRi assay in the unsorted, naive population of cells. (Library pool D3 vs D2 are two different versions of the dCasX protein, and represent replicates of the CRISPRi assay.)

[0106] FIGS. 42A-42B shows the structure of wild-type CasX and RNA guide (SEQ ID NO:4). FIG. 42A depicts the CryoEM structure of Deltaproteobacteria CasX protein:sgRNA RNP complex (PDB id: 6YN2), including two stem loops, a pseudoknot, and a triplex. FIG. 42B depicts the secondary structure of the sgRNA was identified from the structure shown in (A) using the tool RNAPDBee 2.0 (rnapdbee.cs.put.poznan.pl/, using the tools 3DNA/DSSR, and using the VARNA visualization tool). RNA regions are indicated. Residues that were not evident in the PDB crystal structure file are indicated by plain-text letters (i.e., not encircled), and are not included in residue numbering.

[0107] FIGS. 43A-43C depicts comparisons between two guide RNA scaffolds. FIG. 43A provides the sequence alignment between the single guide scaffold 1 (SEQ ID NO:4) and scaffold 2 (SEQ ID NO:5). FIG. 43B shows the predicted secondary structure of scaffold 1 (without the 5′ ACAUCU bases which were not in the cryoEM structure). Prediction was done using RNAfold (v 2.1.7), using a constraint that was derived from the base-pairing observed in the cryoEM structure (see FIG. 42A-42B). This constraint required the base pairs observed in the cryoEM structure to be formed, and required the bases involved in triplex formation to be unpaired. This structure has distinct base pairing from the lowest-energy predicted structure at the 5′ end (i.e., the pseudoknot and triplex loop). FIG. 43C shows the predicted secondary structure of scaffold 2. Prediction was done for scaffold 1, using a similar constraint based on the sequence alignment.

[0108] FIG. 44 shows a graph comparing GFP-knockdown capability of scaffold 1 versus scaffold 2 in GFP-lipofection assay, using four different spacers utilizing different PAM sequences, as described in Example 17. The results demonstrate the greater editing imparted by use of the modified scaffold 2 compared to the wild-type scaffold 1; the latter showing no editing with spacers utilizing GTC and CTC PAM sequences.

[0109] FIGS. 45A-45C show graphs depicting the enrichment of single variants across the scaffold, revealing mutable regions, as described in Example 17. FIG. 45A depicts substituted bases (A, T, G, or C; top to bottom), FIG. 45B depicts inserted bases (A, T, G, or C; top to bottom), and FIG. 45C depicts deletions at the individual nucleotide position (X-axis) across scaffold 2. Enrichment values were averaged across the three deadCasX versions, relative to the average WT value. Scaffolds with relative log2 enrichment >0 are considered ‘enriched’, as they were more represented in the sorted population relative to the naive population than the wildtype scaffold was represented. Error bars represent the confidence interval across the three catalytically dead CasX experiments.

[0110] FIG. 46 are scatterplots showing that the enrichment values obtained across different dCasX variants are largely consistent, as described in Example 17. Libraries D2 and DDD have highly correlated enrichment scores, while D3 is more distinct.

[0111] FIG. 47 shows a bar graph of cleavage activity of several scaffold variants in a more stringent lipofection assay at the SOD1-GFP locus, as described in Example 17.

[0112] FIG. 48 shows a bar graph of cleavage activity for several scaffold variants using two different spacers; 8.2 and 8.4 that target SOD1-GFP locus (and a non-targeting spacer NT), with low-MOI lentiviral transduction using a p34 plasmid backbone, as described in Example 15.

[0113] FIG. 49 is a schematic showing the secondary structure of single guide 174 on top and the linear structure on the bottom, with lines joining those segments associating by base-pairing or other non-covalent interactions. The scaffold stem (white, no fill) (and loop) and the extended stem (grey, no fill) (and loop) are adjacent from 5′ to 3′ in the sequence. However, the pseudoknot and extended stems are formed from strands that have intervening regions in the sequence. The triplex is formed, in the case of single guide 174, comprising nucleotides 5′-CUUUG′-3′ AND 5′-CAAAG-3′ that form a base-paired duplex and nucleotides 5′-UUU-3′ that associates with the 5′-AAA-3′ to form the triplex region.

[0114] FIGS. 50A-50B shows comparisons between the highly-evolved single guide 174 and the scaffolds 1 and 2 that served as the starting points for the DME procedures described in Example 17. FIG. 50A shows a bar graph of cleavage activity of head-to-head comparisons of cleavage activity of the guide scaffolds with five different spacers in a plasmid lipofection assay at the GFP locus in HEK-GFP cells. FIG. 50B shows the sequence alignment between scaffold 2 and guide 174 (SEQ ID NO: 2238). Asterisks indicate point mutations, and the dotted box shows the entire extended stem swap.

[0115] FIGS. 51A-51B shows scatterplots of HEK-iGFP cleavage assay for scaffolds sequences relative to WT scaffold with 2 spacers; 4.76 (FIG. 51A) and 4.77 (FIG. 51B), as described in Example 17.

[0116] FIG. 52 shows a scatterplot comparing the normalized cleavage activity of several scaffolds relative to WT with 2 spacers (4.76 and 4.77), as described in Example 17. Error bars combine internal measurement error (SD) and inter-experimental measurement error (SD across replicate experiments for those variants tested more than once), in quadrature.

[0117] FIG. 53 shows a scatterplot comparing the normalized cleavage activity of multiple scaffolds relative to WT in the HEK-iGFP cleavage assay to the enrichments obtained from the CRISPRi comprehensive screen, as described in Example 17. Generally, scaffold mutations with high enrichment (>1.5) have cleavage activity comparable to or greater than WT. Two variants have high cleavage activity with low enrichment scores (C18G and T17G); interestingly, these substitutions are at the same position as several highly enriched insertions (FIGS. 45A-45C). Labels indicate the mutations for a subset of the comparisons.

### DETAILED DESCRIPTION

[0118] While exemplary embodiments have been shown and described herein, it will be obvious to those skilled in the art that such embodiments are provided by way of example only. Numerous variations, changes, and substitutions will now occur to those skilled in the art without departing from the inventions claimed herein. It should be understood that various alternatives to the embodiments described herein may be employed in practicing the embodiments of the disclosure. It is intended that the claims define the scope of the invention and that methods and structures within the scope of these claims and their equivalents be covered thereby.

[0119] All publications, patents, and patent applications mentioned in this specification are herein incorporated by reference to the same extent as if each individual publication, patent, or patent application was specifically and individually indicated to be incorporated by reference.

### I. General Methods

[0120] The practice of the present invention employs, unless otherwise indicated, conventional techniques of immunology, biochemistry, chemistry, molecular biology, microbiology, cell biology, genomics and recombinant DNA, which can be found in such standard textbooks as Molecular Cloning: A Laboratory Manual, 3rd Ed. (Sambrook et al., HaRBor Laboratory Press 2001); Short Protocols in Molecular Biology, 4th Ed. (Ausubel et al. eds., John Wiley & Sons 1999); Protein Methods (Bollag et al., John Wiley & Sons 1996); Nonviral Vectors for Gene Therapy (Wagner et al. eds., Academic Press 1999); Viral Vectors (Kaplift & Loewy eds., Academic Press 1995); Immunology Methods Manual (1. Lefkovits ed., Academic Press 1997); and Cell and Tissue Culture: Laboratory Procedures in Biotechnology (Doyle & Griffiths, John Wiley & Sons 1998), the disclosures of which are incorporated herein by reference.

[0121] Where a range of values is provided, it is understood that endpoints are included and that each intervening value, to the tenth of the unit of the lower limit unless the context clearly dictates otherwise, between the upper and lower limit of that range and any other stated or intervening value in that stated range, is encompassed. The upper and lower limits of these smaller ranges may independently be included in the smaller ranges, and are also encompassed, subject to any specifically excluded limit in the stated range. Where the stated range includes one or both of the limits, ranges excluding either or both of those included limits are also included.

[0122] Unless defined otherwise, all technical and scientific terms used herein have the same meaning as commonly understood by one of ordinary skill in the art to which this invention belongs. All publications mentioned herein are incorporated herein by reference to disclose and describe the methods and/or materials in connection with which the publications are cited.

[0123] It must be noted that as used herein and in the appended claims, the singular forms “a,” “an,” and “the” include plural referents unless the context clearly dictates otherwise.

[0124] It will be appreciated that certain features of the disclosure, which are, for clarity, described in the context of separate embodiments, may also be provided in combination in a single embodiment. In other cases, various features of the disclosure, which are, for brevity, described in the context of a single embodiment, may also be provided separately or in any suitable sub-combination. It is intended that all combinations of the embodiments pertaining to the disclosure are specifically embraced by the present disclosure and are disclosed herein just as if each and every combination was individually and explicitly disclosed. In addition, all sub-combinations of the various embodiments and elements thereof are also specifically embraced by the present disclosure and are disclosed herein just as if each and every such sub-combination was individually and explicitly disclosed herein.

### II. DME Methods for Generation of Improved Gene Editing Molecules

[0125] Provided herein are methods of generating and selecting improved biomolecule variants, such as RNA, DNA, or protein variants, through Deep Mutational Evolution (DME). Also provided are the biomolecule variants selected from said methods, and libraries of variants which may be used in said methods.

[0126] In some embodiments, the methods, variants, and libraries described herein may include insertions and/or deletions, in addition to substitution mutations. In some embodiments, the DME methods provided herein include constructing and screening one or more libraries representing a comprehensive set of mutations of a biomolecule, e.g. encompassing all possible substitutions, as well as insertions and deletions of one or more amino acids (in the case of proteins), or one or more ribonucleotides (in the case of RNA), or one or more deoxyribonucleotides (in the case of DNA). In other embodiments, a subset of such mutations is screened. In some embodiments, screening of one or more libraries of biomolecule variants is used to obtain information about how certain mutations (such as insertion and/or deletion and/or substitution, or combinations thereof) or the mutation to certain regions of a reference biomolecule affects the functional properties of said biomolecule, or affect the functional properties of a protein encoded by said biomolecule. In some embodiments, modifications resulting in one or more improved characteristics are then combined in one or more additional rounds of biomolecule modification, either through rational design or randomly, and these second round variants are screened to identify desirable characteristics. Additional libraries may be constructed and screened using information obtained from the previous library, and through such iterative processes, in some embodiments, one or more biomolecule variants are selected. Thus, for example, in some embodiments the methods provided herein comprise a second, third, fourth, fifth, or more rounds of variant construction and screening. In certain embodiments, such biomolecule variants may have one or more improved characteristics, which are described in greater detail herein. In still other embodiments, such biomolecule variants may encode for a protein with one or more improved characteristics, which are described in greater detail herein. Such iterative construction and evaluation of variants may lead, for example, to identification of mutational themes that lead to certain functional outcomes, such as identification of types of mutations or of regions of the protein or RNA that when mutated in a certain way lead to one or more improved or altered functions. Layering of such identified mutations may then further improve function, for example through additive or synergistic interactions. The use of iterative rounds of biomolecule evolution may progressively improve/alter one or more functional characteristics of the variant biomolecules, resulting in a highly functional protein, RNA, or DNA variant that is specialized for a desired application.

[0127] In some embodiments, these methods include constructing a library comprising a plurality of variants of a reference biomolecule, wherein each variant independently has an alteration of at least one monomer location (e.g., ribonucleotide for RNA, or amino acid for protein, or deoxyribonucleotide for DNA), and wherein the alterations can independently include insertion of one or more monomers, deletion of one or more monomers, or substitution of the monomer. In some embodiments, the library collectively represents alteration of at least 1%, or at least 10%, or up to 100%, of the monomer locations of the reference biomolecule. This may include, for example, libraries wherein each variant only has one alteration of one monomer location, but collectively the library represents alteration of at least 1%, or at least 10%, or up to 100%, of the monomer locations of the reference biomolecule. In certain embodiments, the library collectively represents each possible alteration of at least 1%, or at least 10%, or up to 100%, of the monomer locations of the reference biomolecule.

[0128] I. Libraries

[0129] Provided herein are methods and systems for developing variants of biomolecules, such as proteins, RNA, and DNA, that include evaluating insertions and deletions of monomers in addition to substitutions. Such methods include constructing one or more libraries of variants of a reference biomolecule, and evaluating said libraries for change in one or more characteristics of the variants compared to the reference biomolecule. Such information can be used, for example to construct one or more additional variants and/or libraries, such as by layering mutations with a desired effect on certain characteristics, or by selecting a subset of the initial library and subjecting it to a round of random mutation, or by taking information learned from screening of a library and using it to construct a new variant with additional alterations. In some embodiments, an iterative process of library construction, evaluation, and new library construction is used.

[0130] Proteins, RNA, and DNA are polymers composed of amino acid, ribonucleotide, and deoxyribonucleotide monomers, respectively. For each monomer location, there are three types of variations possible: l) substitution of the original monomer for another monomer; 2) insertion of one or more consecutive monomers; and 3) deletion of one or more consecutive monomers. DME libraries comprising substitutions, insertions, and deletions, alone or in combination, to any one or more monomers within any biomolecule described herein, are considered within the scope of the invention.

[0131] The complexity of variations is further increased when taking into account the number of different monomers that can be used in substitution or each single insertion—20 different naturally occurring amino acids for proteins, and 4 naturally occurring nucleotides for RNA and DNA. Therefore, with respect to naturally occurring amino acids and naturally occurring ribonucleotides, the number of possible alterations per monomer location for a protein includes: 19 possible monomer (amino acid) substitutions, 20 possible monomer insertions (per single insertion), 1 possible monomer deletion (per single deletion). The number of possible alterations per monomer location for RNA or DNA includes: 3 possible monomer (nucleotide) substitutions, 4 possible monomer insertions (per single insertion), 1 possible monomer deletion (per single deletion).

[0132] A library used in the methods described herein may, in some embodiments, comprise substitutions, insertions, and deletions, alone or in combination, to one or more monomers within any biomolecule described herein. In some embodiments of the methods, every possible single alteration of every monomer is evaluated. For example, in some embodiments one or more libraries of variants are constructed and evaluated, wherein each variant independently comprises a single alteration compared to the reference biomolecule, and the one or more libraries collectively represent every possible single alteration of every monomer location. In some embodiments, insertion of two or more monomers at every monomer location is evaluated, or deletion of two or more monomers at very monomer location is evaluated, or a combination thereof. For example, for a reference protein of 1000 residues, there are 1000 possible single amino acid deletions, 1.9*10\hat{ }4 possible amino acid substitutions, and 2*10\hat{ }4 possible single amino acid insertions. For double amino acid insertions, there are 4*10\hat{ }5 possible variants; likewise, triples have 8*10\hat{ }6 variants and so forth. In some embodiments, one or more libraries are built to evaluate the comprehensive set of mutations to a biomolecule, encompassing all possible substitutions, as well as insertions and deletions of, for example, between 1 to 4 amino acids (in the case of proteins) or nucleotides (in the case of RNA or DNA). In some embodiments, one or more libraries are built to evaluate a subset of a comprehensive set of mutations to a biomolecule, encompassing all possible substitutions to a particular region of a biomolecule, as well as insertions and deletions to a particular region of a biomolecule of, for example, between 1 to 4 amino acids (in the case of proteins) or nucleotides (in the case of RNA or DNA).

[0133] In some embodiments, the library comprises a subset of all possible alterations to monomers. For example, in some embodiments, a library collectively represents a single alteration of one monomer, for at least 1%, or at least 10% of the total monomer locations in a biomolecule, wherein each single alteration is selected from the group consisting of substitution, single insertion, and single deletion. In some embodiments, the library collectively represents the single alteration of one monomer, for at least 20%, at least 30%, at least 40%, at least 50%, at least 60%, at least 70%, at least 80%, at least 90%, at least 95%, or up to 100% of the total monomer locations in a starting biomolecule (e.g., each variant comprises one modified monomer, and the collection of variants represent single alteration of one monomer for at least a certain percentage of total locations). In certain embodiments, for a certain percentage of the total monomer locations in a starting biomolecule, the library collectively represents each possible single alteration of one monomer, such as all possible substitutions with the 19 other naturally occurring amino acids (for a protein) or 3 other naturally occurring ribonucleotides (for RNA) or 3 other naturally occurring deoxyribonucleotides (for DNA), insertion of each of the 20 naturally occurring amino acids (for a protein) or 4 naturally occurring ribonucleotides (for RNA) or 4 naturally occurring deoxyribonucleotides (for DNA), or deletion of the monomer. In still further embodiments, insertion at each location is independently greater than one monomer, for example insertion of two or more, three or more, or four or more monomers, or insertion of between one to four, between two to four, or between one to three monomers. In some embodiments, deletion at each location is independently greater than one monomer, for example deletion of two or more, three or more, or four or more monomers, or deletion of between one to four, between two to four, or between one to three monomers. Examples of such libraries of CasX variants and gNA variants are described in Examples 14 and 15, respectively.

[0134] In some embodiments of the methods and compositions provided herein, the monomers used in substitution and/or insertion are naturally occurring monomers (e.g., the 20 naturally occurring standard amino acids; the 4 ribonucleotides A, U, C, and G; and the 4 deoxyribonucleotides A, T, C, and G). In other embodiments, one or more unnatural monomers is used. Such monomers may include, for example, chemically- or enzymatically-modified monomers, chemically synthesized monomers, monomers obtained commercially, or others. In some embodiments, one or more naturally occurring monomers is modified after being incorporated into a variant. For example, in some embodiments, a protein variant is constructed and then one or more amino acid residues of the protein variant are chemically or enzymatically modified to produce the protein variant to be screened. In other embodiments, an unnatural monomer is incorporated into the variant as-is. For example, in certain embodiments one or more RNA or DNA variants are constructed using unnatural nucleotides, which may be obtained commercially or synthesized through techniques known to one of skill in the art.

[0135] In some embodiments, the biomolecule is a protein and the individual monomers are amino acids. In those embodiments where the biomolecule is a protein, the number of possible mutations at each monomer (amino acid) position in the protein comprises 19 naturally occurring amino acid substitutions, 20 naturally occurring amino acid insertions and 1 amino acid deletion, leading to a total of 40 possible mutations per amino acid in the protein. In some embodiments, one or more variants comprises substitution of more than one amino acid monomers, wherein each monomer location is independently selected. Thus, for example, in some embodiments a library comprises one or more variants wherein two or more consecutive amino acids are independently substituted. In some embodiments, wherein the library comprises variants independently comprising one or more substitutions, each substitution is a conservative substitution. A conservative substitution replaces the original amino acid with an amino acid that has a similar characteristic. For example, if the original amino acid is glycine, a conservative substitution may be one that replaces the glycine with another aliphatic amino acid, such as alanine, valine, leucine, or isoleucine. If the amino acid is phenylalanine, a conservative substitution may be one that replaces the phenylalanine with another aromatic amino acid, such as tyrosine or tryptophan. In other embodiments of, wherein the library comprises variants independently comprising one or more substitutions, each substitution is a non-conservative substitution (e.g., a substitution with an amino acid that has a different characteristic). In some embodiments, conservative substitution of an amino acid may cause the variant to retain one or more desirable characteristics at that location (e.g., polarity, or charge, or hydrophobic interactions, or another characteristic) while still providing the variability that may lead to one or more improved characteristics of the variant overall. For example, a non-conservative substitution of the original amino acid glycine may be with a charged amino acid, or an aromatic amino acid, or a cyclic amino acid. In still further embodiments, wherein the library comprises variants independently comprising one or more substitutions, each substitution is independently a non-conservative substitution or a conservative substitution.

[0136] In other embodiments, the biomolecule is RNA and the individual monomers are ribonucleotides. In those embodiments where the biomolecule is RNA, the number of possible mutations at each monomer (ribonucleotide) position in the RNA comprises 3 naturally occurring ribonucleotide substitutions, 4 naturally occurring ribonucleotide insertions, and 1 naturally occurring ribonucleotide deletion, leading to a total of 8 possible mutations per ribonucleotide in the RNA. In some embodiments, one or more variants comprises substitution of more than one ribonucleotide monomers, wherein each monomer location is independently selected. Thus, for example, in some embodiments a library comprises one or more variants wherein two or more consecutive ribonucleotides are independently substituted.

[0137] In still further embodiments, the biomolecule is DNA and the individual monomers are deoxyribonucleotides. In those embodiments where the biomolecule is DNA, the number of possible mutations at each monomer (deoxyribonucleotide) position in the DNA comprises 3 naturally occurring deoxyribonucleotide substitutions, 4 naturally occurring deoxyribonucleotide insertions, and 1 naturally occurring deoxyribonucleotide deletion, leading to a total of 8 possible mutations per deoxyribonucleotide in the DNA. In some embodiments, one or more variants comprises substitution of more than one deoxyribonucleotide monomers, wherein each monomer location is independently selected. Thus, for example, in some embodiments a library comprises one or more variants wherein two or more consecutive deoxyribonucleotides are independently substituted.

[0138] In some embodiments, a library of protein variants comprising insertions is a 1 amino acid insertion library, a 2 amino acid insertion library, a 3 amino acid insertion library, a 4 amino acid insertion library, a 5 amino acid insertion library, a 6 amino acid insertion library, a 7 amino acid insertion library, or an 8 amino acid insertion library. In some embodiments, a protein variant library comprises insertions wherein each insertion comprises between 1 and 8 amino acids, between 1 and 7 amino acids, between 1 and 6 amino acids, between 1 and 5 amino acids, between 1 and 4 amino acids, between 1 and 3 amino acids, or 1 or 2 amino acids. In certain embodiments, the library represents insertion of, for example, independently between 1 to 4 amino acids (or 5, or 6, or more) for at least a subset of total monomer locations, such as at least 1%, at least 5%, at least 10%, at least 20%, at least 30%, at least 40%, or up to 90%, or up to 100%. In some embodiments, for each inserted amino acid, the library collectively represents insertion of each of the 20 naturally occurring amino acids at that location. In certain embodiments, for each inserted amino acid, the library collectively represents insertion of at least 1 (e.g., proline scanning), at least 2 (e.g., negative charge scanning), at least 5, at least 10, or at least 15 of the 20 naturally occurring amino acids at that location. Thus, for example, in some embodiments libraries representing the full scope of possible naturally occurring insertions (including variability in the amino acid) for each insertion location are evaluated.

[0139] In some embodiments, a library of RNA or DNA variants comprising insertions is a 1 nucleotide insertion library, a 2 nucleotide insertion library, a 3 nucleotide insertion library, a 4 nucleotide insertion library, a 5 nucleotide insertion library, a 6 nucleotide insertion library, a 7 nucleotide insertion library, an 8 nucleotide insertion library, a 9 nucleotide insertion library, a 10 nucleotide insertion library, a 11 nucleotide insertion library, a 12 nucleotide insertion library, a 13 nucleotide insertion library, a 14 nucleotide insertion library, a 15 nucleotide insertion library, a 16 nucleotide insertion library, or more. In some embodiments, an RNA or DNA variant library comprises insertions, wherein each insertion is independently between 1 and 16 nucleotides, between 1 and 14 nucleotides, between 1 and 12 nucleotides, 1 and 10 nucleotides, between 1 and 8 nucleotides, between 1 and 6 nucleotides, between 1 and 4 nucleotides, or 1 or 2 nucleotides. In certain embodiments, the library represents insertion of, for example, independently between 1 to 4 nucleotides (or 5, or 6, or 7, or 8, or up to 16) for at least a subset of total monomer locations, such as at least 1%, at least 5%, at least 10%, at least 20%, at least 30%, at least 40%, or up to 90%, or up to 100%. In some embodiments, for each inserted nucleotide, the library collectively represents insertion of each of the 4 naturally occurring nucleotides at that location (e.g., the four naturally occurring ribonucleotides for RNA, or the four naturally occurring deoxyribonucleotides for DNA). In certain embodiments, for each inserted nucleotide, the library collectively represents insertion of at least 1, at least 2, at least 3, or each of 4 naturally occurring nucleotides at that location. Thus, for example, in some embodiments libraries representing the full scope of possible insertions (including variability in the nucleotide) for each insertion location are evaluated.

[0140] In some embodiments, a library of protein variants comprising deletions is a 1 amino acid deletion library, a 2 amino acid deletion library, a 3 amino acid deletion library, a 4 amino acid deletion library, a 5 amino acid deletion library, a 6 amino acid deletion library, a 7 amino acid deletion library, or an 8 amino acid deletion library. In some embodiments, a protein variant library comprises deletions wherein each deletion is independently between 1 and 8 amino acids, between 1 and 7 amino acids, between 1 and 6 amino acids, between 1 and 5 amino acids, between 1 and 4 amino acids, between 1 and 3 amino acids, or 1 or 2 amino acids. In certain embodiments, the library represents deletions of, for example, independently between 1 to 4 amino acids (or 5, or 6, or more) for at least a subset of total monomer locations, such as at least 1%, at least 5%, at least 10%, at least 20%, at least 30%, at least 40%, or up to 90%, or up to 100%.

[0141] In some embodiments, a library of RNA or DNA variants comprising deletions is a 1 nucleotide deletion library, a 2 nucleotide deletion library, a 3 nucleotide deletion library, a 4 nucleotide deletion library, a 5 nucleotide deletion library, a 6 nucleotide deletion library, a 7 nucleotide deletions library, an 8 nucleotide deletion library, a 9 nucleotide deletion library, a 10 nucleotide deletion library, a 11 nucleotide deletion library, a 12 nucleotide deletion library, a 13 nucleotide deletion library, a 14 nucleotide deletion library, a 15 nucleotide deletion library, or a 16 nucleotide deletion library. In some embodiments, an RNA or DNA variant library comprises deletions wherein each deletion is independently between 1 and 16 nucleotides, between 1 and 14 nucleotides, between 1 and 12 nucleotides, between 1 and 10 nucleotides, between 1 and 8 nucleotides, between 1 and 6 nucleotides, between 1 and 4 nucleotides, or 1 or 2 nucleotides. In certain embodiments, the library represents deletions of, for example, independently between 1 to 4 nucleotides (or 5, or 6, or more) for at least a subset of total monomer locations, such as at least 1%, at least 5%, at least 10%, at least 20%, at least 30%, at least 40%, or up to 90%, or up to 100%. In some embodiments, wherein the variants are RNA, the nucleotides are ribonucleotides. In other embodiments, wherein the variants are DNA, the nucleotides are deoxyribonucleotides.

[0142] In some embodiments, a library of protein variants comprising substitution of at least 1%, at least 5%, at least 10%, at least 20%, at least 30%, at least 40%, or up to 90%, or up to 100% of total monomer locations is evaluated. Such libraries may, in some embodiments, further comprise evaluation of variability in the amino acid used for each insertion location. In some embodiments, for each substituted amino acid, the library collectively represents substitution with each of the other 19 naturally occurring amino acids at that location. In certain embodiments, for each substituted amino acid, the library collectively represents substitution with at least 5, at least 10, or at least 15 of the other 19 naturally occurring amino acids at that location.

[0143] In some embodiments, a library of RNA or DNA variants comprising substitution of at least 1%, at least 5%, at least 10%, at least 20%, at least 30%, at least 40%, or up to 90%, or up to 100% of total monomer locations is evaluated. Such libraries may, in some embodiments, further comprise evaluation of variability in the nucleotide used for each insertion location. In some embodiments, for each substituted nucleotide, the library collectively represents substitution with each of the other 3 naturally occurring nucleotides at that location. In certain embodiments, for each substituted nucleotide, the library collectively represents substitution with at least 1, at least 2, or each of the 3 other naturally occurring nucleotides at that location.

[0144] It should be further understood that libraries used in the methods described herein may comprise combinations of insertions, substitutions, and deletions, as described herein. Thus, a library representing each possible alteration of at least 1%, at least 5%, at least 10%, at least 20%, at least 30%, at least 40%, at least 50%, or up to 70%, or up to 80%, or up to 90%, or up to 100% of individual monomer locations is, in some embodiments, evaluated. Furthermore, in some embodiments, alterations are layered, such that a single variant may comprise an insertion and a deletion, an insertion and a substitution, a deletion and a substitution, or each of an insertion, a deletion, and a substitution, at different locations of the biomolecule. In certain embodiments, each variant independently comprises between one to sixteen, one to fourteen, one to twelve, one to ten, one to eight, one to six, between one to five, between one to four, between one to three, between one to two, at least one, at least two, at least three, at least four, at least five, or at least six alterations independently selected from the group consisting of substitution, insertion, and deletion.

[0145] Thus, in some embodiments, the library comprises variants each independently comprising alteration of one or more locations, wherein collectively the library represents alteration of at least 1%, at least 5%, at least 10%, at least 30%, at least 50%, at least 80%, or at least 99% of the total locations of the reference molecule. In certain embodiments, the library comprises variants each independently comprising alteration of two or more locations, three or more locations, four or more locations, between one and ten locations, between one and eight locations, between one and six locations, or between one and four locations; wherein collectively the library represents alteration of at least 1%, at least 5%, at least 10%, at least 30%, at least 50%, at least 80%, or at least 99% of the total locations of the reference molecule.

[0146] In some embodiments, a reference biomolecule can have at least 1, 2, 3, 4, 5, 6, 7, 8, 9, 10, 20, 30, 40, 50, 100 or more monomers that are systematically mutated to produce a library of biomolecule variants. In some embodiments, every monomer in a biomolecule is varied independently. For example, wherein the biomolecule is a protein with two target amino acids, a library design may enumerate the 40 possible mutations at each of the two target amino acids.

[0147] In some embodiments, each varied monomer of a biomolecule is independently randomly selected; in other embodiments, each varied monomer of a biomolecule is selected by intentional design, or by previous random mutations that had desired characteristics. Thus, in some embodiments, a library comprises random variants, variants that were designed, variants comprising random mutations and designed mutations within a single biomolecule, or any combinations thereof.

[0148] Further provided herein are methods of selecting an improved biomolecule using one or more libraries as described herein. For example, in some embodiments, provided herein is a method of selecting an improved biomolecule variant, wherein the biomolecule is a protein or RNA, the method comprising:
[0149] (i) constructing a library of biomolecule variants as described herein, wherein each variant is independently a variant of the same reference biomolecule;
[0150] (ii) screening the library of (i);
[0151] (iii) identifying at least a portion of the library of (i) that exhibits one or more improved characteristics compared to the reference biomolecule; and
[0152] (iv) selecting the improved biomolecule variant from the identified at least a portion of the library, wherein the improved biomolecule variant exhibits one or more improved characteristics compared to the reference biomolecule.

[0153] In some embodiments, the library of biomolecule variants of (i) comprises a plurality of biomolecule variants:
[0154] wherein each variant is independently a variant of the same reference biomolecule, wherein each variant comprises an alteration of one or more monomer locations of the reference biomolecule, wherein the monomer is an amino acid of the protein or ribonucleotide of the RNA, and
[0155] wherein each alteration of a monomer location is independently selected from the group consisting of substitution of the monomer, deletion of one or more consecutive monomers beginning at the location, and insertion of one or more consecutive monomers adjacent to the location;
[0156] wherein the library represents variants comprising alteration of one or more locations for at least 1% of the monomer locations of the reference biomolecule.

[0157] It should be understood that any library as has been described herein may be used in the methods provided herein. For example, in some embodiments the library represents variations comprising alteration of one or more locations for at least 1%, at least 5%, at least 10%, at least 20%, at least 30%, at least 40%, at least 50%, at least 60%, at least 70%, at least 80%, at least 90%, at least 95%, or up to 100% of the monomer locations of the reference biomolecule. In certain embodiments the library comprises variants in which each variant has one or more, two or more, three or more, or greater than three alterations, or has at least two different types of alterations, or has only one type of alteration, or any combinations that have been described herein.

[0158] In some embodiments, the library comprises biomolecule variants with a single alteration of four monomer locations. In certain embodiments, the library comprises variants representing a single alteration of a single location for at least 1% of the total monomer locations, at least 10% of the total monomer locations, at least 30% of the total monomer locations, at least 70% of the total monomer locations, or at least 90% of the total monomer locations. In some embodiments, the library comprises variants representing deletion of one or more monomers beginning at the location, and variants comprising insertion of one or more new monomers adjacent to the location, for at least 30% of monomer locations. In still further embodiments, the library comprises variants representing insertion of each of one, two, three, and four monomers adjacent to the location for at least 80% of the monomer locations. In some embodiments, for each inserted new monomer, the library represents each naturally occurring monomer possibility (e.g., 20 naturally occurring amino acids, or 4 naturally occurring nucleotides). In some embodiments, wherein the library comprises variants with one or more insertions adjacent to a monomer location, each insertion is independently upstream or downstream of the monomer location. In other embodiments, each insertion is downstream of the location (e.g., in some libraries, insertion adjacent to a specified monomer location always indicates the insertion is downstream of that location). In still further embodiments, each insertion is upstream of the location. In some embodiments, deletion of one or more consecutive monomers comprises deletion of between one to four consecutive monomers. In certain embodiments, the library comprises variants representing deletion of each of one, two, three, and four consecutive monomers for at least 80% of the monomer locations. In some embodiments, the substitution of the monomer comprises replacing the monomer with one of the other naturally occurring monomers (e.g., 19 other naturally occurring amino acids, or 3 other naturally occurring nucleotides). In some embodiments, wherein the biomolecule is protein, the library comprises variants that collectively represent in which the same monomer is replaced with each of ten other naturally occurring amino acids, or each of the nineteen other naturally occurring amino acids. In other embodiments, wherein the biomolecule is RNA, library comprises variants that collectively represent in which the same monomer is replaced with each of the three other naturally occurring ribonucleotides. In still further embodiments, wherein the biomolecule is DNA, library comprises variants that collectively represent in which the same monomer is replaced with each of the three other naturally occurring deoxyribonucleotides.

[0159] In still further embodiments, the library comprises variants for each of following alterations for at least 80% of the monomer locations:
[0160] deletion of each of one, two, three, and four consecutive monomers,
[0161] insertion of each of one, two three, and four consecutive monomers, and
[0162] substitution of the same monomer with each of the other naturally occurring monomers.

[0163] In some embodiments of said library, each variant independently comprises one, two, three, four, five, six, seven, eight, nine, ten, eleven, twelve, thirteen, fourteen, fifteen, sixteen, seventeen, eighteen, nineteen, twenty, or greater alterations itself, and the library as a collective represents the described alterations for at least 80% of the total monomer locations of the reference biomolecule.

[0164] In yet further embodiments, provided herein are methods of using the information gained from screening one or more libraries as provided herein to construct one or more additional variants, or libraries. Screening a library may provide information about what types and locations of alterations have a positive, negative, or neutral effect on one or more characteristics of a reference biomolecule. Such information may be used in the construction of one or more additional variants, or in one or more additional libraries. While a variant with a particular improved characteristic may be desired, information regarding what alterations have a neutral or negative effect can also be helpful. For example, screening variants may demonstrate that varying a particular region of a reference biomolecule has little effect on desired characteristics, indicating this region is highly mutable with few negative results and therefore may, without wishing to be bound by any theory, be a flexible region to alter for different purposes. This information could be useful, for example, to inform the location of a handle or tag for a future variant, or to alter the sequence for improved expression or to adapt to a new expression system.

[0165] In another example, without wishing to be bound by any theory, constructs comprising four or more T nucleotides in row may be difficult to express in human expression systems. Screening a variant library comprising one or more variants in which a 4+ T region has been altered (e.g., by substitution) may demonstrate, in some embodiments, that certain substitutions do not have a detrimental effect on the desired characteristics of the biomolecule (such as solubility or activity). Such information can then be used, for example, to construct a variant in which a 4+ T region has been altered such that it is expected to be better suited to human expression systems, but without negatively affecting desirable positive characteristics. One exemplary such variant described herein includes the sgRNA with T10C alteration, used as the sgRNA in FIGS. 11A-C. The development of this sgRNA variant included information gleaned from the data shown in FIGS. 3A-3B, and 4A-4C, demonstrating that alteration of the T10 location did not have detrimental effects. Thus, this location could be substituted with a C, removing the 4T motif that is believed to have increased termination in human expression systems. Information obtained from the methods of variant and/or library construction and screening provided herein may, therefore, be combined with other information about the biomolecules and/or other alterations to construct new variants. Such additional alterations may include, for example, the addition of one or more functionalities (such as through protein fusions or combination with ribozymes) or removal of one or more regions of the protein (such as a stem truncation). Thus, the methods and compositions provided herein may, in some embodiments, provide information about regions of the biomolecule that are more highly mutable, which can be changed to a larger degree without loss of desirable characteristics, which could be subject to rational alterations (such as to install handles or additional functionality), or which can be removed, or any combinations thereof. The methods and compositions may also provide information about what alterations can be combined (e.g., “stacked”) in one or more additional variants, and/or additional libraries.

[0166] In some embodiments, the information obtained from the methods and compositions provided herein can be used, for example, to construct a variant nucleic acid (NA). In some embodiments, the variant NA is a guide NA. A guide NA (gNA) refers to a nucleic acid molecule that binds to a Cas protein or variant thereof, forming a nucleic acid-protein complex, and targets the complex to a specific location within a target nucleic acid (e.g., a target DNA). In some embodiments, the gNA is a deoxyribonucleic acid (DNA) molecule (a gDNA). In some embodiments, the gNA is a ribonucleic acid (RNA) molecule (a gRNA). In still further embodiments, the gNA comprises both deoxyribonucleotides and ribonucleotides. In some embodiments a guide NA is constructed based at least in part on information obtained using the methods and compositions described herein (e.g., screening an RNA library, or a DNA library, or both). In some embodiments, the guide NA is a single guide NA (sgNA). In some embodiments, the guide NA is a double guide NA (dgNA). In some embodiments, the guide NA binds to CasX, CasY, Cas9, Cas12a, Cas12b, Cas12c, Cas12f, Cas12g, Cas12h, Cas12i, Cas12j, Cas13a, Cas13b, Cas13c, Cas13d, Cas14, CASCADE, CSM, or CSY. In some embodiments, the guide NA binds to CasX, or CasY.

[0167] In certain embodiments of the methods provided herein, the method comprises one or more additional screening steps. For example, in some embodiments the at least a portion of the library identified in step (iii) is screened. In certain embodiments, the screen in (ii) and the screen of the at least a portion identified in step (iii) are different screen types (e.g., screen for different characteristics, or by different methods, or a combination thereof). In other embodiments, they are the same screen types. Evaluation of the libraries described herein is described in further detail below.

[0168] II. Library Evaluation

[0169] Once a library has been constructed, it is evaluated for one or more characteristics. Any suitable method of evaluation may be used, such that has sufficient throughput so as to map the number of individual mutations in the library (which may include, e.g., up to millions or billions of individual variants overall); and the method links phenotype and genotype. In some embodiments, methods with a low throughput may be used, for example, to evaluate a subpopulation of a library, or a small library targeting certain mutations, or a small library layering certain mutations of interest, or a focused library developed through multiple rounds of mutation and evaluation.

[0170] In some embodiments, the evaluation method uses living cells. Methods using living cells may, in some embodiments, be desirable because the effect of the genotype on the phenotype can be readily ascertained. Living cells may also be used to directly amplify sub-populations of the overall library.

[0171] An exemplary, but non-limiting DME screening assay comprises Fluorescence-Activated Cell Sorting (FACS). In some embodiments, FACS may be used to assay millions or up to billions of unique cells in a library. An exemplary FACS screening protocol comprises the following steps:

[0172] (1) PCR amplifying a purified plasmid library from the library construction phase. Flanking PCR primers can be designed that add appropriate restriction enzyme sites flanking the DNA encoding the biomolecule. Standard oligonucleotides can be used as PCR primers, and can be synthesized commercially. Commercially available PCR reagents can be used for the PCR amplification, and protocols should be performed according to the manufacturer's instructions. Methods of designing PCR primers, choice of appropriate restriction enzyme sites, selection of PCR reagents and PCR amplification protocols will be readily apparent to the person of ordinary skill in the art.

[0173] (2) The resulting PCR product is digested with the designed flanking restriction enzymes. Restriction enzymes may be commercially available, and methods of restriction enzyme digestion will be readily apparent to the person of ordinary skill in the art.

[0174] (3) The PCR product is ligated into a new DNA vector. Appropriate DNA vectors may include vectors that allow for the expression of the library in a cell. Exemplary vectors include, but are not limited to, lentiviral vectors, adenoviral vectors, adeno-associated viral (AAV) vectors and plasmids. This new DNA vector can be part of a protocol such as lentiviral integration in mammalian tissue culture, or a simple expression method such as plasmid transformation in bacteria. Any vectors that allow for the expression of the biomolecule, and the library of variants thereof, in any suitable cell type, are considered within the scope of the disclosure. Cell types may include bacterial cells, yeast cells, and mammalian cells. Exemplary bacterial cell types may include E. coli. Exemplary yeast cell types may include Saccharomyces cerevisiae. Exemplary mammalian cell types may include mouse, hamster, and human cell lines, such as HEK293 cells. Choice of vector and cell type will be readily apparent to the person of ordinary skill in the art. DNA ligase enzymes can be purchased commercially, and protocols for their use will also be readily apparent to one of ordinary skill in the art.

[0175] (4) Once the library has been cloned into a vector suitable for in vivo expression, the library is screened. If the biomolecule has a function which alters fluorescent protein production in a living cell, the biomolecule's biochemical function will be correlated with the fluorescence intensity of the cell overall. By observing a population of millions of cells on a flow cytometer, a library can be seen to produce a broad distribution of fluorescence intensities. Individual sub-populations from this overall broad distribution can be extracted by FACS. For example, if the function of the biomolecule is to repress expression of a fluorescent protein, the least bright cells will be those expressing biomolecules whose function has been improved by DME. Alternatively, if the function of the biomolecule is to increase expression of a fluorescent protein, the brightest cells will be those expressing biomolecules whose function has been improved by DME. Cells can be isolated based on fluorescence intensity by FACS and grown separately from the overall population.

[0176] (5) After FACS sorting cells expressing a library of biomolecule variants, cultures comprising the original library and/or only highly functional biomolecule variants, as determined by FACS sorting, can be amplified separately. If the cells that were FACS sorted comprise cells that express the library of biomolecule variants from a plasmid (for example, E. coli cells transformed with a plasmid expression vector), these plasmids can be isolated, for example through miniprep. Conversely if the library of biomolecule variants has been integrated into the genomes of the FACs sorted cells, this DNA region can be PCR amplified and, optionally, subcloned into a suitable vector for further characterization using methods known in the art. Thus, the end product of library screening is a DNA library representing the initial, or ‘naive’, library, as well as one or more DNA libraries containing sub-populations of the naive library which comprise highly functional mutant variants of the biomolecule identified by the screening processes described herein.

[0177] In some embodiments, a biomolecule library that has been screened or selected for one or more variants are further characterized. For example, in some embodiments, a library has one or more highly functional variants which are further characterized to gain insight into possible mutational correlations or relationships that lead to a desired functional change. In some embodiments, further characterizing the library comprises analyzing variants individually through sequencing, such as Sanger sequencing, to identify the specific mutation or mutations that are connected to the change in characteristic (such as a highly functional characteristic). Individual mutant variants of the biomolecule can be isolated through standard molecular biology techniques for later analysis of function.

[0178] In some embodiments, further characterizing the library comprises high throughput sequencing of both the entire, original library (the “naïve” library, e.g. the library in step (i)) and the one or more sub-populations of highly functional variants (e.g., a library of step (iii)). This approach may, in some embodiments, allow for the rapid identification of mutations that are over-represented in the one or more sub-populations of highly functional variants compared to a naïve library. Without wishing to be bound by any theory, mutations that are over-represented in the one or more sub-populations of highly functional variants may be responsible for the activity of the highly functional variants. In some embodiments, further characterizing the library comprises both sequencing of individual variants and high throughput sequencing of both the naïve library and the one or more sub-populations of highly functional variants.

[0179] High throughput sequencing can produce high throughput data indicating the functional effect of the library members. In embodiments wherein one or more libraries represents every possible mutation of every monomer location, such high throughput sequencing can evaluate the functional effect of every possible mutation. Such sequencing can also be used to evaluate one or more highly functional sub-populations of a given library, which in some embodiments may lead to identification of mutations that result in improved function. An exemplary protocol for high throughput sequencing of a library with a highly functional sub-population is as follows:

[0180] (1) High throughput sequence the naïve library (N). High throughput sequence the highly functional sub-population library (F). Any high throughput sequencing platform that can generate a suitable abundance of reads can be used. Exemplary sequencing platforms include, but are not limited to Illumina, Ion Torrent, 454 and PacBio sequencing platforms.

[0181] (2) Select a particular mutation to evaluate (i). Calculate the total fractional abundance of i in N (i(N)). Calculate the total fractional abundance of i in F, (i(F)).

[0182] (3) Calculate the following: [(i(F)+1)/(i(N)+1)]. This value, the ‘enrichment ratio’, is correlated with the function of the particular mutant variant i of the biomolecule. Other methods of calculating enrichment may also be used (e.g., pseudocount).

[0183] (4) Calculate the enrichment ratio for each of the mutations observed in deep sequencing of the library.

[0184] (5) The set of enrichment ratios for the entire library can be converted to a log scale and rescaled such that all values range between −1 and 1, where a value of 0 represents no enrichment (i.e. an enrichment ratio of 1). These rescaled values can be referred to as the relative ‘fitness’ of any particular mutation. These fitness values quantitatively indicate the effect a particular mutation has on the biochemical function of the biomolecule.

[0185] (6) The set of calculated fitness values can be mapped to visually represent the fitness landscape of all possible mutations to a biomolecule. The fitness values can also be rank ordered to determine the most beneficial mutations contained within the library. Other analysis methods could also be used separately or in combination. For example, machine learning could be used to predict the effects of untested mutations or to determine specification locations and/or mutations that have the greatest effect.

[0186] III. Iterating DME

[0187] In some embodiments, a highly functional variant produced by DME has more than one mutation. For example, combinations of different mutations can in some embodiments produce optimized biomolecules whose function is further improved by the combination of mutations. In some embodiments, the effect of combining mutations on the function of a biomolecule is additive. As used herein, a combination of mutations that is additive refers to a combination whose effect on function is equal to the sum of the effects of each individual mutation when assayed in isolation. In some embodiments, the effect of combining mutations on function of the biomolecule is synergistic. As used herein, a combination of mutations that is synergistic refers to a combination whose effect on function is greater than the sum of the effects of each individual mutation when assayed in isolation. Other mutations may exhibit additional unexpected nonlinear additive effects, or even negative effects; this phenomenon is referred to herein as epistasis.

[0188] Epistasis can be unpredictable, and can be a significant source of variation when combining mutations. Epistatic effects can, in some embodiments, be addressed through additional high throughput experimental methods in library construction and evaluation. In some embodiments, the entire library construction and evaluation protocol can be iterated, returning to the library construction step and selecting only mutations identified as having desired effects (such as increased functionality) from an initial library screen. Thus, in some embodiments, library construction and screening is iterated, with one or more cycles focusing the library on a sub-population or sub-populations of mutations having one or more desired effects. In such embodiments, layering of selected mutations may lead to improved variants. In certain embodiments, mutations that lead to different improved effects are layered, such that a variant may have two or more improved characteristics compared to the reference biomolecule. In some alternative embodiments, the process can be repeated with the full set of mutations, but targeting a novel, pre-mutated version of the biomolecule. For example, one or more highly functional variants identified in a first round of library construction, evaluation, and characterization can be used as the target for further rounds using a broad, unfocused set of further mutations (such as every possible mutation, or a subset thereof), and the process repeated. Any number, type of iterations or combinations of iterations are envisaged as within the scope of the disclosure.

[0189] Thus, in some aspects, provided herein is an iterative method of selecting an improved biomolecule variant, wherein the biomolecule is a protein, DNA, or RNA, comprising:
[0190] (i) constructing a library comprising a plurality of biomolecule variants, wherein each variant is independently a variant of the same reference biomolecule;
[0191] (ii) screening the library of (i);
[0192] (iii) identifying at least a portion of the library of (i) that exhibits one or more improved characteristics compared to the reference biomolecule;
[0193] (iv) carrying out one or more additional rounds of library construction and screening, wherein construction of each library comprises:
   [0194] altering one or more additional monomer locations of the identified portion of the previous library to produce a subsequent library of biomolecule variants; and
[0195] (iv) selecting the improved biomolecule variant from the final library of biomolecule variants, wherein the improved biomolecule variant exhibits one or more improved characteristics compared to the reference biomolecule.

[0196] The library of (i) may be any variant library described herein, such as:
[0197] wherein each variant comprises an alteration of one or more monomer locations of the reference biomolecule, wherein the monomer is an amino acid of the protein or nucleotide of the RNA or DNA, and
[0198] wherein each alteration of a monomer location is independently selected from the group consisting of substitution of the monomer, deletion of one or more consecutive monomers beginning at the location, and insertion of one or more consecutive monomers adjacent to the location;
[0199] wherein the library represents variants comprising alteration of one or more locations for at least 10% of the monomer locations of the reference biomolecule

[0200] In some embodiments, an iterative method comprises one additional round, two additional rounds, three additional rounds, four additional rounds, five additional rounds, or more of library construction and screening. In certain embodiments, each subsequent library is smaller than the previous library, for example wherein evolution of the variants is directed to a particular mutation or theme of mutations. In other embodiments, each library is of approximately the same size, for example within about 1%, within about 5%, within about 10%, or within about 15% of the previous or subsequent, or both, libraries. In still further embodiments, each library is of an independent size.

[0201] In certain embodiments, one or more alterations of the biomolecule variants in the variant library being screened, or, if more than one library is screened (e.g., in multiple rounds, and/or iterative processes), one or more alterations of biomolecule variants in one or more libraries, is independently an alteration deriving from rational design. In some embodiments, one or more alterations is random. In certain embodiments, a combination of rational alterations (e.g., altering, including removing, one or more motifs present in the reference sequence based on a specific structural or functional analysis or theory).

[0202] In some embodiments, the DME methods provided herein comprise further modification to one or more variants of a library using rational mutagenesis, and then optionally evaluating said modifications. For example, in some embodiments, without wishing to be bound by any theory, four T ribonucleotides in a row may cause termination in a human cell expression system. Thus, for example, in some embodiments one or more variants is selected through the methods provided herein, and then the one or more variants is evaluated for the presence of four T ribonucleotides in the sequence, and identified variants are modified to remove such repeats. In some embodiments, these further modified variants are evaluated.

[0203] IV. Reference Biomolecule

[0204] Any suitable reference protein, RNA, or DNA may be used as the reference biomolecule in the methods and compositions described herein. In some embodiments, the reference biomolecule is a naturally occurring protein, RNA, or DNA. In other embodiments, the reference biomolecule is not naturally occurring.

[0205] In some embodiments, the reference biomolecule is a protein. In certain embodiments, the reference biomolecule is a CRISPR/Cas family endonuclease (Cas protein), for example one that interacts with a guide RNA (gRNA) to form a ribonucleoprotein (RNP) complex. In some embodiments, the RNP is capable of cleaving DNA. In some embodiments, the RNP is capable of cleaving RNA. In certain embodiments, the RNP complex can be targeted to a particular site in a target nucleic acid via base pairing between the gRNA and a target sequence in the target nucleic acid.

[0206] In some embodiments, the CRISPR/Cas protein is a Class 1 protein, e.g. a Type I, Type III, or Type IV protein. In some embodiments, the CRISPR/Cas protein is a Class II protein, e.g., a Type II, Type V, or Type VI protein.

[0207] Any suitable Cas protein may be used. For example, in some embodiments, the Cas protein is CasX, CasY, Cas9, Cas12a, Cas12b, Cas12c, Cas12f, Cas12g, Cas12h, Cas12i, Cas12j, Cas13a, Cas13b, Cas13c, Cas13d, Cas14, CASCADE, CSM, or CSY. In some embodiments, the Cas protein is CasX. In certain embodiments, the Cas protein is CasY.

[0208] In some embodiments, the reference CasX protein is a naturally-occurring protein. For example, reference CasX proteins can, in some embodiments, be isolated from naturally occurring prokaryotic cells, such as cells of Deltaproteobacter, Planctomycetes, or Candidatus Sungbacteria species. In other embodiments, the reference CasX protein is not a naturally-occurring protein.

[0209] In some embodiments, the reference biomolecule is a CasX protein isolated or derived from Deltaproteobacter. In some embodiments, the reference biomolecule is a CasX protein isolated or derived from Planctomycetes. In some embodiments, the reference biomolecule is a CasX protein isolated or derived from Candidatus Sungbacteria. In some embodiments, the reference biomolecule comprises a sequence at least 60% identical, at least 65% identical, at least 70% identical, at least 75% identical, at least 80% identical, at least 81% identical, at least 82% identical, at least 83% identical, at least 84% identical, at least 85% identical, at least 86% identical, at least 86% identical, at least 87% identical, at least 88% identical, at least 89% identical, at least 89% identical, at least 90% identical, at least 91% identical, at least 92% identical, at least 93% identical, at least 94% identical, at least 95% identical, at least 96% identical, at least 97% identical, at least 98% identical, at least 99% identical, at least 99.5% identical or 100% identical to a sequence of SEQ ID NO: 1, SEQ ID NO: 2, or SEQ ID NO: 3.

| (SEQ ID NO: 1) | |
|---|---|
| 1 | MEKRINKIRK KLSADNATKP VSRSGPMKTL LVRVMTDDLK KRLEKRRKKP EVMPQVISNN |
| 61 | AANNLRMLLD DYTKMKEAIL QVYWQEFKDD HVGLMCKFAQ PASKKIDQNK LKPEMDEKGN |
| 121 | LTTAGFACSQ CGQPLFVYKL EQVSEKGKAY TNYFGRCNVA EHEKLILLAQ LKPEKDSDEA |
| 181 | VTYSLGKFGQ RALDFYSIHV TKESTHPVKP LAQIAGNRYA SGPVGKALSD ACMGTIASFL |
| 241 | SKYQDIIIEH QKVVKGNQKR LESLRELAGK ENLEYPSVTL PPQPHTKEGV DAYNEVIARV |
| 301 | RMWVNLNLWQ KLKLSRDDAK PLLRLKGFPS FPVVERRENE VDWWNTINEV KKLIDAKRDM |
| 361 | GRVFWSGVTA EKRNTILEGY NYLPNENDHK KREGSLENPK KPAKRQFGDL LLYLEKKYAG |
| 421 | DWGKVFDEAW ERIDKKIAGL TSHIEREEAR NAEDAQSKAV LTDWLRAKAS FVLERLKEMD |
| 481 | EKEFYACEIQ LQKWYGDLRG NPFAVEAENR VVDISGFSIG SDGHSIQYRN LLAWKYLENG |
| 541 | KREFYLLMNY GKKGRIRFTD GTDIKKSGKW QGLLYGGGKA KVIDLTFDPD DEQLIILPLA |
| 601 | FGTRQGREFI WNDLLSLETG LIKLANGRVI EKTIYNKKIG RDEPALFVAL TFERREVVDP |
| 661 | SNIKPVNLIG VDRGENIPAV IALTDPEGCP LPEFKDSSGG PTDILRIGEG YKEKQRAIQA |
| 721 | AKEVEQRRAG GYSRKFASKS RNLADDMVRN SARDLFYHAV THDAVLVFEN LSRGFGRQGK |
| 781 | RTFMTERQYT KMEDWLTAKL AYEGLTSKTY LSKTLAQYTS KTCSNCGFTI TTADYDGMLV |
| 841 | RLKKTSDGWA TTLNNKELKA EGQITYYNRY KRQTVEKELS AELDRLSEES GNNDISKWTK |
| 901 | GRRDEALFLL KKRFSHRPVQ EQFVCLDCGH EVHADEQAAL NIARSWLFLN SNSTEFKSYK |
| 961 | SGKQPFVGAW QAFYKRRLKE VWKPNA. |
| (SEQ ID NO: 2) | |
| 1 | MQEIKRINKI RRRLVKDSNT KKAGKTGPMK TLLVRVMTPD LRERLENLRK KPENIPQPIS |
| 61 | NTSRANLNKL LTDYTEMKKA ILHVYWEEFQ KDPVGLMSRV AQPAPKNIDQ RKLIPVKDGN |
| 121 | ERLTSSGFAC SQCCQPLYVY KLEQVNDKGK PHTNYFGRCN VSEHERLILL SPHKPEANDE |
| 181 | LVTYSLGKFG QRALDFYSIH VTRESNHPVK PLEQIGGNSC ASGPVGKALS DACMGAVASF |
| 241 | LTKYQDIILE HQKVIKKNEK RLANLKDIAS ANGLAFPKIT LPPQPHTKEG IEAYNNVVAQ |
| 301 | IVIWVNLNLW QKLKIGRDEA KPLQRLKGFP SFPLVERQAN EVDWWDMVCN VKKLINEKKE |
| 361 | DGKVFWQNLA GYKRQEALLP YLSSEEDRKK GKKFARYQFG DLLLHLEKKH GEDWGKVYDE |
| 421 | AWERIDKKVE GLSKEIKLEE ERRSEDAQSK AALTDWLRAK ASFVIEGLKE ADKDEFCRCE |
| 481 | LKLQKWYGDL RGKPFAIEAE NSILDISGFS KQYNCAFIWQ KDGVKKLNLY LIINYFKGGK |
| 541 | LRFKKIKPEA FEANRFYTVI NKKSGEIVPM EVNFNFDDPN LIILPLAFGK RQGREFIWND |
| 601 | LLSLETGSLK LANGRVIEKT LYNRRTRQDE PALFVALTFE RREVLDSSNI KPMNLIGIDR |
| 661 | GENIPAVIAL TDPEGCPLSR FKDSLGNPTH ILRIGESYKE KQRTIQAAKE VEQRRAGGYS |
| 721 | RKYASKAKNL ADDMVRNTAR DLLYYAVTQD AMLIFENLSR GFGRQGKRTF MAERQYTRME |
| 781 | DWLTAKLAYE GLPSKTYLSK TLAQYTSKTC SNCGFTITSA DYDRVLEKLK KTATGWMTTI |
| 841 | NGKELKVEGQ ITYYNRYKRQ NVVKDLSVEL DRLSEESVNN DISSWTKGRS GEALSLLKKR |
| 901 | FSHRPVQEKF VCLNCGFETH ADEQAALNIA RSWLFLRSQE YKKYQTNKTT GNTDKRAFVE |
| 961 | TWQSFYRKKL KEVWKPAV. |
| (SEQ ID NO: 3) | |
| 1 | MDNANKPSTK SLVNTTRISD HFGVTPGQVT RVESEGIIPT KRQYAIIERW FAAVEAARER |
| 61 | LYGMLYAHFQ ENPPAYLKEK FSYETFFKGR PVLNGLRDID PTIMTSAVFT ALRHKAEGAM |
| 121 | AAFHTNHRRL FEEARKKMRE YAECLKANEA LLRGAADIDW DKIVNALRTR LNTCLAPEYD |
| 181 | AVIADFGALC AFRALIAETN ALKGAYNHAL NQMLPALVKV DEPEEAEESP RLRFFNGRIN |
| 241 | DLPKFPVAER ETPPDTETII RQLEDMARVI PDTAEILGYI HRIRHKAARR KPGSAVPLPQ |
| 301 | RVALYCAIRM ERNPEEDPST VAGHFLGEID RVCEKRRQGL VRTPFDSQIR ARYMDIISFR |
| 361 | ATLAHPDRWT EIQFLRSNAA SRRVRAETIS APFEGFSWTS NRTNPAPQYG MALAKDANAP |
| 421 | ADAPELCICL SPSSAAFSVR EKGGDLIYMR PTGGRRGKDN PGKEITWVPG SFDEYPASGV |
| 481 | ALKLRLYFGR SQARRMLTNK TWGLLSDNPR VFAANAELVG KKRNPQDRWK LFFHMVISGP |
| 541 | PPVEYLDFSS DVRSRARTVI GINRGEVNPL AYAVVSVEDG QVLEEGLLGK KEYIDQLIET |
| 601 | RRRISEYQSR EQTPPRDLRQ RVRHLQDTVL GSARAKIHSL IAFWKGILAI ERLDDQFHGR |
| 661 | EQKIIPKKTY LANKTGFMNA LSFSGAVRVD KKGNPWGGMI EIYPGGISRT CTQCGTVWLA |
| 721 | RRPKNPGHRD AMVVIPDIVD DAAATGFDNV DCDAGTVDYG ELFTLSREWV RLTPRYSRVM |
| 781 | RGTLGDLERA IRQGDDRKSR QMLELALEPQ PQWGQFFCHR CGFNGQSDVL AATNLARRAI |
| 841 | SLIRRLPDTD TPPTP. |

[0210] A polynucleotide or polypeptide can have a certain percent “sequence identity” to another polynucleotide or polypeptide, meaning that, when aligned, that percentage of bases or amino acids are the same, and in the same relative position, when comparing the two sequences. Sequence similarity can be determined in a number of different manners. To determine sequence identity, sequences can be aligned using the methods and computer programs, including BLAST, available over the world wide web at ncbi.nlm.nih.gov/BLAST.

[0211] In other embodiments, the reference biomolecule is RNA. In some embodiments, the reference biomolecule is a CRISPR guide RNA. CRISPR guide RNAs (gRNA) include ribonucleic acid molecules that bind to a Cas protein, forming a ribonucleoprotein complex (RNP), and targets the complex to a specific location within a target nucleic acid (e.g., a target DNA or target RNA). In some embodiments, the gRNA is naturally occurring. In other embodiments, the gRNA is not naturally occurring.

[0212] The “spacer”, also sometimes referred to as “targeting” sequence of a gRNA, can in some embodiments be modified so that the gRNA can target a Cas protein to any desired sequence of any desired target nucleic acid, with the exception (e.g., as described herein) that the PAM sequence can be taken into account. Thus, for example, a gRNA may in some embodiments have a spacer sequence with complementarity to (e.g., can hybridize to) a sequence in a nucleic acid in a eukaryotic cell, e.g., a eukaryotic nucleic acid (e.g., a eukaryotic chromosome, chromosomal sequence, a eukaryotic RNA, etc.) that is adjacent to a sequence complementary to a PAM sequence. In some embodiments, the spacer of a gRNA has between 14 and 35 consecutive nucleotides. In some embodiments, the spacer has 14, 15, 16, 18, 18, 19, 20, 21, 22, 23 24, 25, 26, 27, 28, 29, 30, 31, 32, 33, 34 or 35 consecutive nucleotides. In some embodiments, the spacer sequence can comprise 0 to 5, 0 to 4, 0 to 3, or 0 to 2 mismatches relative to the target nucleic acid sequence and retain sufficient binding specificity such that the RNP comprising the gRNA comprising the spacer sequence can form a complementary bond with respect to the target nucleic acid.

[0213] In some embodiments, a gRNA can include two segments, a targeting segment and a protein-binding segment (constituting the scaffold discussed below); in some embodiments, the segments are fused. The targeting segment of a gRNA includes a nucleotide sequence (a guide sequence) that is complementary to (and therefore hybridizes with) a specific sequence (a target site) within a target nucleic acid (e.g., a target ssRNA, a target ssDNA, the complementary strand of a double stranded target DNA, etc.). The protein-binding segment (or “protein-binding sequence”) interacts with (e.g., binds to) a Cas protein. In those embodiments where the gRNA includes two segments, the protein-binding segment of the gRNA includes two complementary stretches of nucleotides that hybridize to one another to form a double stranded RNA duplex (dsRNA duplex). Site-specific binding and/or cleavage of a target nucleic acid (e.g., genomic DNA) can occur at one or more locations (e.g., target sequence of a target nucleic acid) determined by base-pairing complementarity between the gRNA (the guide sequence of the g RNA) and the target nucleic acid. A gRNA and a Cas protein may form a complex (e.g., bind via non-covalent interactions), and the gRNA may provide target specificity to the complex by including a guide sequence (a nucleotide sequence that is complementary to a sequence of a target nucleic acid). The guide sequence is sometimes referred to herein as the “spacer” or “spacer sequence.” The Cas protein of the complex may provide the site-specific activity (e.g., cleavage activity provided by the Cas protein). In other words, in some embodiments the Cas protein is guided to a target nucleic acid sequence (e.g. a target sequence) by virtue of its association with the Cas gRNA.

[0214] In some embodiments, a gRNA includes an “activator” and a “targeter” (e.g., an “activator-RNA” and a “targeter-RNA,” respectively). When the “activator” and a “targeter” are two separate molecules, the reference gRNA may be referred to, for example, as a “dual guide RNA”, a “dgRNA,” a “double-molecule guide RNA”, or a “two-molecule guide RNA”. The term “targeter” or “targeter RNA” is used herein to refer to a crRNA-like molecule (crRNA: “CRISPR RNA”) of a Cas guide RNA (e.g., a dgRNA; or, when the “activator” and the “targeter” are linked together, a single guide RNA (sgRNA)). Thus, for example, a reference gRNA (dgRNA or sgRNA) comprises a guide sequence and a duplex-forming segment (e.g., a duplex forming segment of a crRNA, which can also be referred to as a crRNA repeat). Because the sequence of a guide sequence (the segment that hybridizes with a target sequence of a target nucleic acid) of a targeter may be modified by a user to hybridize with a desired target nucleic acid, the sequence of a targeter may be a non-naturally occurring sequence. A targeter comprises both the guide sequence (aka spacer sequence) of the gRNA and a stretch of nucleotides that forms one half of the dsRNA duplex of the protein-binding segment of the gRNA. A corresponding trans-activating crRNA (tracrRNA)-like molecule (activator) comprises a stretch of nucleotides (a duplex-forming segment) that forms the other half of the dsRNA duplex of the protein-binding segment of the gRNA. In some embodiments, a targeter and an activator (as a corresponding pair) hybridize to form a dsRNA. In some embodiments, the activator and targeter of a gRNA are covalently linked to one another (e.g., via intervening nucleotides) and the gRNA is referred to herein as a “single guide RNA”, an “sgRNA,” a “single-molecule guide RNA,” or a “one-molecule guide RNA”. Thus, a sgRNA, in some embodiments, comprises a targeter (e.g., targeter-RNA) and an activator (e.g., activator-RNA) that are linked to one another (e.g., covalently by intervening nucleotides), and hybridize to one another to form the double stranded RNA duplex (dsRNA duplex) of the protein-binding segment of the guide RNA, resulting in a stem-loop structure. In some embodiments, the targeter and the activator each have a duplex-forming segment, where the duplex forming segment of the targeter and the duplex-forming segment of the activator have complementarity with one another and hybridize to one another.

[0215] In some embodiments, the linker covalently attaching the targeter and the activator is a stretch of nucleotides. Exemplary linkers may include, but are not limited to GAAA, GAGAAA, and CUUCGG. In some embodiments, the linker is CUUCGG. In some cases, the targeter and activator of a sgRNA are linked to one another by intervening nucleotides, and the linker has a length of from 3 to 20 nucleotides (nt) (e.g., from 3 to 15, 3 to 12, 3 to 10, 3 to 8, 3 to 6, 3 to 5, 3 to 4, 4 to 20, 4 to 15, 4 to 12, 4 to 10, 4 to 8, 4 to 6, or 4 to 5 nt). In some embodiments, the linker of a sgRNA has a length of from 3 to 100 nucleotides (nt) (e.g., from 3 to 80, 3 to 50, 3 to 30, 3 to 25, 3 to 20, 3 to 15, 3 to 12, 3 to 10, 3 to 8, 3 to 6, 3 to 5, 3 to 4, 4 to 100, 4 to 80, 4 to 50, 4 to 30, 4 to 25, 4 to 20, 4 to 15, 4 to 12, 4 to 10, 4 to 8, 4 to 6, or 4 to 5 nt). In some embodiments, the linker of a sgRNA has a length of from 3 to 10 nucleotides (nt) (e.g., from 3 to 9, 3 to 8, 3 to 7, 3 to 6, 3 to 5, 3 to 4, 4 to 10, 4 to 9, 4 to 8, 4 to 7, 4 to 6, or 4 to 5 nt).

[0216] In some embodiments, the reference CRISPR guide RNA is a single guide RNA (sgRNA), for example a sgRNA that binds to CasX, CasY, Cas9, Cas12a, Cas12b, Cas12c, Cas12f, Cas12g, Cas12h, Cas12i, Cas12j, Cas13a, Cas13b, Cas13c, Cas13d, Cas14, CASCADE, CSM, or CSY. In certain embodiments, the CRISPR guide RNA is a single guide RNA that binds CasX. In some embodiments, the CasX is of SEQ ID NO: 1, SEQ ID NO: 2, or SEQ ID NO: 3. In other embodiments, the CRISPR guide RNA is an sgRNA that binds CasY.

[0217] In some embodiments, the reference gRNA comprises a sequence of a naturally-occurring gRNA. In some embodiments, the reference biomolecule is a guide RNA comprising sequence isolated or derived from Deltaproteobacter. In some embodiments, the sequence is a tracrRNA sequence, for example a CasX tracrRNA sequence. Exemplary CasX reference tracrRNA sequences isolated or derived from Deltaproteobacter may include:

(SEQ ID NO: 239)
UUAUUCCAUUACUUUGGAGCCAGUCCCAGCGACUAUGUCGUAUGGACGA
AGCGCUUAUUUAUCGGAGA
and
(SEQ ID NO: 240)
UUAUUCCAUUACUUUGGAGCCAGUCCCAGCGACUAUGUCGUAUGGACGA
AGCGCUUAUUUAUCGG.

[0218] Exemplary crRNA sequences isolated or derived from Deltaproteobacter may comprise a sequence of:

(SEQ ID NO: 241)
CCGAUAAGUAAAACGCAUCAAAG.

[0219] In some embodiments, the reference biomolecule is a gRNA comprising a sequence isolated or derived from Planctomycetes. In some embodiments, the sequence is a tracrRNA sequence, such as a CasX tracrRNA sequence. Exemplary CasX reference tracrRNA sequences isolated or derived from Planctomycetes may include:

(SEQ ID NO: 242)
UUAUCUCAUUACUUUGAGAGCCAUCACCAGCGACUAUGUCGUAUGGGUA
AAGCGCUUAUUUAUCGGAGA
and
(SEQ ID NO: 243)
UUAUCUCAUUACUUUGAGAGCCAUCACCAGCGACUAUGUCGUAUGGGUA
AAGCGCUUAUUUAUCGG.

[0220] Exemplary crRNA sequences isolated or derived from Planctomycetes may comprise a sequence of:

(SEQ ID NO: 244)
UCUCCGAUAAAUAAGAAGCAUCAAAG

[0221] In some embodiments, the reference biomolecule is a gRNA comprising a sequence isolated or derived from Candidatus Sungbacteria. In some embodiments, the sequence is a tracrRNA sequence, such as a CasX tracrRNA sequence. Exemplary CasX tracrRNA sequences isolated or derived from Candidatus Sungbacteria may include:

(SEQ ID NO: 245)
UAAAUUUUUUGAGCCCUAUCUCCGCGAGGAAGACAGGGCUCUUUUCAUG
AGAGGAAGCUUUUAUACCCGACCGGUAAUCCGGUCGGGGGAUUGGCCGU
UGAAACGAUUUUAAAGCGGCCAAUGGGCCCCUCUAUAUGGAUACUACUU
AUAUAAGGAGCUUGGGGAAGAAGAUAGCUUAAUCCCGCUAUCUUGUCAA
GGGGUUGGGGGAGUAUCAGUAUCCGGCAGGCGCC.

[0222] Exemplary crRNA sequences isolated or derived from Candidatus Sungbacteria may comprise sequences of

(SEQ ID NO: 10)
GUUUACACACUCCCUCUCAUAGGGU,
(SEQ ID NO: 11)
GUUUACACACUCCCUCUCAUGAGGU,
(SEQ ID NO: 12)
UUUUACAUACCCCCUCUCAUGGGAU
and
(SEQ ID NO: 13)
GUUUACACACUCCCUCUCAUGGGGG,
and
(SEQ ID NO: 246)
GUUUACACACUCCCUCUCAUAGGG

[0223] In some embodiments, the reference biomolecule is a gRNA comprising a sequence at least 60% identical, at least 65% identical, at least 70% identical, at least 75% identical, at least 80% identical, at least 81% identical, at least 82% identical, at least 83% identical, at least 84% identical, at least 85% identical, at least 86% identical, at least 86% identical, at least 87% identical, at least 88% identical, at least 89% identical, at least 89% identical, at least 90% identical, at least 91% identical, at least 92% identical, at least 93% identical, at least 94% identical, at least 95% identical, at least 96% identical, at least 97% identical, at least 98% identical, at least 99% identical, at least 99.5% identical or 100% identical to a sequence isolated or derived from Deltaproteobacter, Candidatus Sungbacteria, or Planctomycetes.

[0224] In some embodiments, the reference biomolecule is a reference gRNA that is a capable of forming a complex with Cas12a.

[0225] In some embodiments, the reference biomolecule is a reference gRNA comprising a sequence that is not naturally occurring, for example a chimeric or fusion sequence.

[0226] In some embodiments, the reference biomolecule is a CasX sgRNA comprising a sequence of:

(SEQ ID NO: 4)
ACAUCUGGCGCGUUUAUUCCAUUACUUUGGAGCCAGUCCCAGCGACUAU
GUCGUAUGGACGAAGCGCUUAUUUAUCGGAGAgaaaCCGAUAAGUAAAA
CGCAUCAAAG.

[0227] In some embodiments, the reference biomolecule is a CasX sgRNA comprising the sequence of:

(SEQ ID NO: 5)
UACUGGCGCUUUUAUCUCAUUACUUUGAGAGCCAUCACCAGCGACUAUG
UCGUAUGGGUAAAGCGCUUAUUUAUCGGAGAGAAAUCCGAUAAAUAAGA
AGCAUCAAAG.

[0228] In some embodiments, the reference biomolecule is a CasX sgRNA comprising a sequence at least 60% identical, at least 65% identical, at least 70% identical, at least 75% identical, at least 80% identical, at least 81% identical, at least 82% identical, at least 83% identical, at least 84% identical, at least 85% identical, at least 86% identical, at least 86% identical, at least 87% identical, at least 88% identical, at least 89% identical, at least 89% identical, at least 90% identical, at least 91% identical, at least 92% identical, at least 93% identical, at least 94% identical, at least 95% identical, at least 96% identical, at least 97% identical, at least 98% identical, at least 99% identical, at least 99.5% identical or 100% identical to SEQ ID NO: 4, or SEQ ID NO: 5.

[0229] V. Variants

[0230] In still further aspects, also provided herein are variants selected by the methods described herein. In some embodiments, the variant has one or more improved characteristics compared to the reference biomolecule.

[0231] In some embodiments, the variant is a protein, and the one or more improved characteristics are independently selected from the group consisting of improved folding, improved stability, improved activity, improved protein solubility, improved binding to a binding partner, improved stability of a protein:binding partner complex, and improved yield.

[0232] In certain embodiments, the variant is a CRISPR associated protein, (e.g., a CasX variant protein) and the one or more improved characteristics are independently selected from the group consisting of improved folding of the variant, improved binding affinity to the guide RNA, improved binding affinity to a target DNA, altered binding affinity to or ability to utilize one or more PAM sequences for the editing of a target DNA, improved unwinding of a target DNA, increased activity, improved editing efficiency, improved editing specificity, increased activity of the nuclease, increased target strand loading for double strand cleavage, decreased target strand loading for single strand nicking, decreased off-target cleavage, decreased off-target binding/nicking, improved binding of the non-target strand of a DNA, improved protein stability, improved protein:guide NA complex stability, improved protein solubility, improved protein:guide RNA complex stability, improved protein yield, increased collateral activity, and decreased collateral activity. In some embodiments, a target DNA is dsDNA. In other embodiments, a target DNA is ssDNA.

[0233] In a particular feature, the methods of the disclosure result in CasX variant protein with the ability to utilize a larger spectrum of PAM sequences for the editing of a target DNA. As used herein, the PAM is a nucleotide sequence proximal to the protospacer that, in conjunction with the targeting sequence of the gNA, helps the orientation and positioning of the CasX for the potential cleavage of the protospacer strand(s). Herein, the protospacer is defined as the DNA sequence complementary to the targeting sequence of the guide RNA and the DNA complementary to that sequence, referred to as the target strand and non-target strand, respectively. PAM sequences may be degenerate, and specific RNP constructs may have different preferred and tolerated PAM sequences that support different efficiencies of cleavage. Following convention, unless stated otherwise, the disclosure refers to both the PAM and the protospacer sequence and their directionality according to the orientation of the non-target strand. This does not imply that the PAM sequence of the non-target strand, rather than the target strand, is determinative of cleavage or mechanistically involved in target recognition. For example, when reference is to a TTC PAM, it may in fact be the complementary GAA sequence that is required for target cleavage, or it may be some combination of nucleotides from both strands. In the case of the CasX proteins disclosed herein, the PAM is located 5′ of the protospacer with a single nucleotide separating the PAM from the first nucleotide of the protospacer. Thus, in the case of reference CasX, a TTC PAM should be understood to mean a sequence following the formula 5′- . . . NNTTCN(protospacer)NNNNNN . . . 3′ (SEQ ID NO: 247) where ‘N’ is any DNA nucleotide and ‘(protospacer)’ is a DNA sequence having identity with the targeting sequence of the guide RNA. In the case of a CasX variant with expanded PAM recognition, a TTC, CTC, GTC, or ATC PAM should be understood to mean a sequence following the formulae: 5′- . . . NNTTCN(protospacer)NNNNNN . . . 3′ (SEQ ID NO: 247); 5′- . . . NNCTCN(protospacer)NNNNNN . . . 3′ (SEQ ID NO: 248); 5′- . . . NNGTCN(protospacer)NNNNNN . . . 3′ (SEQ ID NO: 249); or 5′- . . . NNATCN(protospacer)NNNNNN . . . 3′ (SEQ ID NO: 250). Alternatively, a TC PAM should be understood to mean a sequence following the formula 5′- . . . NNNTCN(protospacer)NNNNNN . . . 3′ (SEQ ID NO: 251). In some embodiments, a CasX variant has improved editing of a PAM sequence exhibits greater editing efficiency and/or binding of a target sequence in the target DNA when any one of the PAM sequences TTC, ATC, GTC, or CTC is located 1 nucleotide 5′ to the non-target strand of the protospacer having identity with the targeting sequence of the gNA in a cellular assay system compared to the editing efficiency and/or binding of an RNP comprising a reference CasX protein in a comparable assay system. In some embodiments, the PAM sequence is TTC. In some embodiments, the PAM sequence is ATC. In some embodiments, the PAM sequence is CTC. In some embodiments, the PAM sequence is GTC.

[0234] In some embodiments, the variant is a CRISPR associated protein, wherein the variant has one or more altered activities compared to a reference. For example, in some embodiments, the variant has altered target specificity, for example specificity for RNA instead of DNA, compared to a reference. In some embodiments, the variant is a nickase Cas protein, or a dead Cas protein, compared to a reference protein which cleaves double stranded DNA.

[0235] In some embodiments, wherein the variant is a CasX variant, the one or more improved characteristics are improved compared to a reference CasX of SEQ ID NO: 1. In other embodiments, wherein the variant is a CasX variant, the one or more improved characteristics are improved compared to a reference CasX of SEQ ID NO: 2. In still further embodiments, wherein the variant is a CasX variant, the one or more improved characteristics are improved compared to a reference CasX of SEQ ID NO: 3.

[0236] In some embodiments, the CasX variant protein has least 60% identity, at least 70% identity, at least 80% identity, at least 85% identity, at least 86% identity, at least 87% identity, at least 88% identity, at least 89% identity, at least 90% identity, at least 91% identity, at least 92% identity, at least 93% identity, at least 94% identity, at least 95% identity, at least 96% identity, at least 97% identity, at least 98% identity, at least 99% identity, at least 99.5% identity, at least 99.6% identity, at least 99.7% identity, at least 99.8% identity or at least 99.9% identity to one of SEQ ID NO: 1, SEQ ID NO: 2, or SEQ ID NO: 3. In some embodiments, the CasX variant protein comprises or consists of a sequence that has at least 1, at least 2, at least 3, at least 4, at least 5, at least 6, at least 7, at least 8, at least 9, at least 10, at least 20, at least 30, at least 40 or at least 50 mutations relative to the sequence of SEQ ID NO: 1, SEQ ID NO: 2, or SEQ ID NO: 3. These mutations can be insertions, deletions, amino acid substitutions, or any combinations thereof.

[0237] In some embodiments, the CasX variant protein has sequence identity to SEQ ID NO: 2 or a portion thereof.

[0238] In some embodiments of the CasX variants described herein, the at least one modification comprises: (a) a substitution of 1 to 100 consecutive or non-consecutive amino acids in the CasX variant; (b) a deletion of 1 to 100 consecutive or non-consecutive amino acids in the CasX variant; (c) an insertion of 1 to 100 consecutive or non-consecutive amino acids in the CasX; or (d) any combination of (a)-(c). In some embodiments, the at least one modification comprises: (a) a substitution of 5-10 consecutive or non-consecutive amino acids in the CasX variant; (b) a deletion of 1-5 consecutive or non-consecutive amino acids in the CasX variant; (c) an insertion of 1-5 consecutive or non-consecutive amino acids in the CasX; or (d) any combination of (a)-(c).

[0239] In some embodiments, the CasX variant protein comprises a substitution of Y789T of SEQ ID NO: 2, a deletion of P793 of SEQ ID NO: 2, a substitution of Y789D of SEQ ID NO: 2, a substitution of T72S of SEQ ID NO: 2, a substitution of I546V of SEQ ID NO: 2, a substitution of E552A of SEQ ID NO: 2, a substitution of A636D of SEQ ID NO: 2, a substitution of F536S of SEQ ID NO:2, a substitution of A708K of SEQ ID NO: 2, a substitution of Y797L of SEQ ID NO: 2, a substitution of L792G SEQ ID NO: 2, a substitution of A739V of SEQ ID NO: 2, a substitution of G791M of SEQ ID NO: 2, a insertion of A at position 661 (\hat{ }G661A) of SEQ ID NO: 2, a substitution of A788W of SEQ ID NO: 2, a substitution of K390R of SEQ ID NO: 2, a substitution of A751S of SEQ ID NO: 2, a substitution of E385A of SEQ ID NO: 2, an insertion of P at position 696 of SEQ ID NO: 2, an insertion of M at position 773 of SEQ ID NO: 2, a substitution of G695H of SEQ ID NO: 2, an insertion of AS at position 793 of SEQ ID NO: 2, an insertion of AS at position 795 of SEQ ID NO: 2, a substitution of C477R of SEQ ID NO: 2, a substitution of C477K of SEQ ID NO: 2, a substitution of C479A of SEQ ID NO: 2, a substitution of C479L of SEQ ID NO: 2, a substitution of I55F of SEQ ID NO: 2, a substitution of K210R of SEQ ID NO: 2, a substitution of C233S of SEQ ID NO: 2, a substitution of D231N of SEQ ID NO: 2, a substitution of Q338E of SEQ ID NO: 2, a substitution of Q338R of SEQ ID NO: 2, a substitution of L379R of SEQ ID NO: 2, a substitution of K390R of SEQ ID NO: 2, a substitution of L481Q of SEQ ID NO: 2, a substitution of F495S of SEQ ID NO:2, a substitution of D600N of SEQ ID NO: 2, a substitution of T886K of SEQ ID NO: 2, a substitution of A739V of SEQ ID NO: 2, a substitution of K460N of SEQ ID NO: 2, a substitution of I199F of SEQ ID NO: 2, a substitution of G492P of SEQ ID NO: 2, a substitution of T1531 of SEQ ID NO: 2, a substitution of R591I of SEQ ID NO: 2, an insertion of AS at position 795 of SEQ ID NO: 2, an insertion of AS at position 796 of SEQ ID NO:2, an insertion of L at position 889 of SEQ ID NO: 2, a substitution of E121D of SEQ ID NO: 2, a substitution of S270W of SEQ ID NO: 2, a substitution of E712Q of SEQ ID NO: 2, a substitution of K942Q of SEQ ID NO: 2, a substitution of E552K of SEQ ID NO:2, a substitution of K25Q of SEQ ID NO: 2, a substitution of N47D of SEQ ID NO: 2, an insertion of T at position 696 of SEQ ID NO: 2, a substitution of L685I of SEQ ID NO: 2, a substitution of N880D of SEQ ID NO: 2, a substitution of Q102R of SEQ ID NO: 2, a substitution of M734K of SEQ ID NO: 2, a substitution of A724S of SEQ ID NO: 2, a substitution of T704K of SEQ ID NO: 2, a substitution of P224K of SEQ ID NO: 2, a substitution of 1(25R of SEQ ID NO: 2, a substitution of M29E of SEQ ID NO: 2, a substitution of H152D of SEQ ID NO: 2, a substitution of S219R of SEQ ID NO: 2, a substitution of E475K of SEQ ID NO: 2, a substitution of G226R of SEQ ID NO: 2, a substitution of A377K of SEQ ID NO: 2, a substitution of E480K of SEQ ID NO: 2, a substitution of K416E of SEQ ID NO: 2, a substitution of H164R of SEQ ID NO: 2, a substitution of K767R of SEQ ID NO: 2, a substitution of I7F of SEQ ID NO: 2, a substitution of M29R of SEQ ID NO: 2, a substitution of H435R of SEQ ID NO: 2, a substitution of E385Q of SEQ ID NO: 2, a substitution of E385K of SEQ ID NO: 2, a substitution of I279F of SEQ ID NO: 2, a substitution of D489S of SEQ ID NO: 2, a substitution of D732N of SEQ ID NO: 2, a substitution of A739T of SEQ ID NO: 2, a substitution of W885R of SEQ ID NO: 2, a substitution of E53K of SEQ ID NO: 2, a substitution of A238T of SEQ ID NO: 2, a substitution of P283Q of SEQ ID NO: 2, a substitution of E292K of SEQ ID NO: 2, a substitution of Q628E of SEQ ID NO: 2, a substitution of R388Q of SEQ ID NO: 2, a substitution of G791M of SEQ ID NO: 2, a substitution of L792K of SEQ ID NO: 2, a substitution of L792E of SEQ ID NO: 2, a substitution of M779N of SEQ ID NO: 2, a substitution of G27D of SEQ ID NO: 2, a substitution of K955R of SEQ ID NO: 2, a substitution of S867R of SEQ ID NO: 2, a substitution of R693I of SEQ ID NO: 2, a substitution of F189Y of SEQ ID NO: 2, a substitution of V635M of SEQ ID NO: 2, a substitution of F399L of SEQ ID NO: 2, a substitution of E498K of SEQ ID NO: 2, a substitution of E386R of SEQ ID NO: 2, a substitution of V254G of SEQ ID NO: 2, a substitution of P793S of SEQ ID NO: 2, a substitution of K188E of SEQ ID NO: 2, a substitution of QT945KI of SEQ ID NO: 2, a substitution of T620P of SEQ ID NO: 2, a substitution of T946P of SEQ ID NO: 2, a substitution of TT949PP of SEQ ID NO: 2, a substitution of N952T of SEQ ID NO: 2, a substitution of K682E of SEQ ID NO: 2, a substitution of K975R of SEQ ID NO: 2, a substitution of L212P of SEQ ID NO: 2, a substitution of E292R of SEQ ID NO: 2, a substitution of 1303K of SEQ ID NO: 2, a substitution of C349E of SEQ ID NO: 2, a substitution of E385P of SEQ ID NO: 2, a substitution of E386N of SEQ ID NO: 2, a substitution of D387K of SEQ ID NO: 2, a substitution of L404K of SEQ ID NO: 2, a substitution of E466H of SEQ ID NO: 2, a substitution of C477Q of SEQ ID NO: 2, a substitution of C477H of SEQ ID NO: 2, a substitution of C479A of SEQ ID NO: 2, a substitution of D659H of SEQ ID NO: 2, a substitution of T806V of SEQ ID NO: 2, a substitution of K808S of SEQ ID NO: 2, an insertion of AS at position 797 of SEQ ID NO: 2, a substitution of V959M of SEQ ID NO: 2, a substitution of K975Q of SEQ ID NO: 2, a substitution of W974G of SEQ ID NO: 2, a substitution of A708Q of SEQ ID NO: 2, a substitution of V711K of SEQ ID NO: 2, a substitution of D733T of SEQ ID NO: 2, a substitution of L742W of SEQ ID NO: 2, a substitution of V747K of SEQ ID NO: 2, a substitution of F755M of SEQ ID NO: 2, a substitution of M771A of SEQ ID NO: 2, a substitution of M771Q of SEQ ID NO: 2, a substitution of W782Q of SEQ ID NO: 2, a substitution of G791F, of SEQ ID NO: 2 a substitution of L792D of SEQ ID NO: 2, a substitution of L792K of SEQ ID NO: 2, a substitution of P793Q of SEQ ID NO: 2, a substitution of P793G of SEQ ID NO: 2, a substitution of Q804A of SEQ ID NO: 2, a substitution of Y966N of SEQ ID NO: 2, a substitution of Y723N of SEQ ID NO: 2, a substitution of Y857R of SEQ ID NO: 2, a substitution of S890R of SEQ ID NO: 2, a substitution of S932M of SEQ ID NO: 2, a substitution of L897M of SEQ ID NO: 2, a substitution of R624G of SEQ ID NO: 2, a substitution of 5603G of SEQ ID NO: 2, a substitution of N737S of SEQ ID NO: 2, a substitution of L307K of SEQ ID NO: 2, a substitution of I658V of SEQ ID NO: 2, an insertion of PT at position 688 of SEQ ID NO: 2, an insertion of SA at position 794 of SEQ ID NO: 2, a substitution of S877R of SEQ ID NO: 2, a substitution of N580T of SEQ ID NO: 2, a substitution of V335G of SEQ ID NO: 2, a substitution of T620S of SEQ ID NO: 2, a substitution of W345G of SEQ ID NO: 2, a substitution of T280S of SEQ ID NO: 2, a substitution of L406P of SEQ ID NO: 2, a substitution of A612D of SEQ ID NO: 2, a substitution of A75I S of SEQ ID NO: 2, a substitution of E386R of SEQ ID NO: 2, a substitution of V351M of SEQ ID NO: 2, a substitution of K210N of SEQ ID NO: 2, a substitution of D40A of SEQ ID NO: 2, a substitution of E773G of SEQ ID NO: 2, a substitution of H207L of SEQ ID NO: 2, a substitution of T62A SEQ ID NO: 2, a substitution of T287P of SEQ ID NO: 2, a substitution of T832A of SEQ ID NO: 2, a substitution of A893S of SEQ ID NO: 2, an insertion of V at position 14 of SEQ ID NO: 2, an insertion of AG at position 13 of SEQ ID NO: 2, a substitution of R11V of SEQ ID NO: 2, a substitution of R12N of SEQ ID NO: 2, a substitution of R13H of SEQ ID NO: 2, an insertion of Y at position 13 of SEQ ID NO: 2, a substitution of R12L of SEQ ID NO: 2, an insertion of Q at position 13 of SEQ ID NO: 2, an substitution of V15S of SEQ ID NO: 2, an insertion of D at position 17 of SEQ ID NO: 2, or a combination thereof.

[0240] In some embodiments, a CasX variant protein comprises more than one substitution, insertion and/or deletion of a reference CasX protein amino acid sequence. In some embodiments, the reference CasX protein comprises or consists essentially of SEQ ID NO: 2. In some embodiments, a CasX variant protein comprises a substitution of S794R and a substitution of Y797L of SEQ ID NO: 2. In some embodiments, a CasX variant protein comprises a substitution of K416E and a substitution of A708K of SEQ ID NO: 2. In some embodiments, a CasX variant comprises a substitution of A708K and a deletion of P793 of SEQ ID NO: 2. In some embodiments, a CasX variant protein comprises a deletion of P793 and a substitution of P793AS SEQ ID NO: 2. In some embodiments, a CasX variant protein comprises a substitution of Q367K and a substitution of I425S of SEQ ID NO: 2. In some embodiments, a CasX variant protein comprises a substitution of A708K, a deletion of P position 793 and a substitution A793V of SEQ ID NO: 2. In some embodiments, a CasX variant protein comprises a substitution of Q338R and a substitution of A339E of SEQ ID NO: 2. In some embodiments, a CasX variant protein comprises a substitution of Q338R and a substitution of A339K of SEQ ID NO: 2. In some embodiments, a CasX variant protein comprises a substitution of S507G and a substitution of G508R of SEQ ID NO: 2. In some embodiments, a CasX variant protein comprises a substitution of L379R, a substitution of A708K and a deletion of P at position 793 of SEQ ID NO: 2. In some embodiments, a CasX variant protein comprises a substitution of C477K, a substitution of A708K and a deletion of P at position 793 of SEQ ID NO: 2. In some embodiments, a CasX variant protein comprises a substitution of L379R, a substitution of C477K, a substitution of A708K and a deletion of P at position of 793 of SEQ ID NO: 2. In some embodiments, a CasX variant protein comprises a substitution of L379R, a substitution of A708K, a deletion of P at position 793 and a substitution A739V of SEQ ID NO: 2. In some embodiments, a CasX variant protein comprises a substitution of C477K, a substitution of A708K, a deletion of P at position 793 and a substitution of A739V of SEQ ID NO: 2. In some embodiments, a CasX variant protein comprises a substitution of L379R, a substitution of C477K, a substitution of A708K, a deletion of P at position 793 and a substitution of A739V of SEQ ID NO: 2. In some embodiments, a CasX variant protein comprises a substitution of L379R, a substitution of A708K, a deletion of P at position 793 and a substitution of M779N of SEQ ID NO: 2. In some embodiments, a CasX variant protein comprises a substitution of L379R, a substitution of A708K, a deletion of P at position 793 and a substitution of M771N of SEQ ID NO: 2. In some embodiments, a CasX variant protein comprises a substitution of L379R, a substitution of 708K, a deletion of P at position 793 and a substitution of D489S of SEQ ID NO: 2. In some embodiments, a CasX variant protein comprises a substitution of L379R, a substitution of A708K, a deletion of P at position 793 and a substitution of A739T of SEQ ID NO: 2. In some embodiments, a CasX variant protein comprises a substitution of L379R, a substitution of A708K, a deletion of P at position 793 and a substitution of D732N of SEQ ID NO: 2. In some embodiments, a CasX variant protein comprises a substitution of L379R, a substitution of A708K, a deletion of P at position 793 and a substitution of G791M of SEQ ID NO: 2. In some embodiments, a CasX variant protein comprises a substitution of L379R, a substitution of 708K, a deletion of P at position 793 and a substitution of Y797L of SEQ ID NO: 2. In some embodiments, a CasX variant protein comprises a substitution of L379R, a substitution of C477K, a substitution of A708K, a deletion of P at position 793 and a substitution of M779N of SEQ ID NO: 2. In some embodiments, a CasX variant protein comprises a substitution of L379R, a substitution of C477K, a substitution of A708K, a deletion of P at position 793 and a substitution of M771N of SEQ ID NO: 2. In some embodiments, a CasX variant protein comprises a substitution of L379R, a substitution of C477K, a substitution of A708K, a deletion of P at position 793 and a substitution of D489S of SEQ ID NO: 2. In some embodiments, a CasX variant protein comprises a substitution of L379R, a substitution of C477K, a substitution of A708K, a deletion of P at position 793 and a substitution of A739T of SEQ ID NO: 2. In some embodiments, a CasX variant protein comprises a substitution of L379R, a substitution of C477K, a substitution of A708K, a deletion of P at position 793 and a substitution of D732N of SEQ ID NO: 2. In some embodiments, a CasX variant protein comprises a substitution of L379R, a substitution of C477K, a substitution of A708K, a deletion of P at position 793 and a substitution of G791M of SEQ ID NO: 2. In some embodiments, a CasX variant protein comprises a substitution of L379R, a substitution of C477K, a substitution of A708K, a deletion of P at position 793 and a substitution of Y797L of SEQ ID NO: 2. In some embodiments, a CasX variant protein comprises a substitution of L379R, a substitution of C477K, a substitution of A708K, a deletion of P at position 793 and a substitution of T620P of SEQ ID NO: 2. In some embodiments, a CasX variant protein comprises a substitution of A708K, a deletion of P at position 793 and a substitution of E386S of SEQ ID NO: 2. In some embodiments, a CasX variant protein comprises a substitution of E386R, a substitution of F399L and a deletion of P at position 793 of SEQ ID NO: 2. In some embodiments, a CasX variant protein comprises a substitution of R581I and A739V of SEQ ID NO: 2.

[0241] In some embodiments, a CasX variant protein comprises more than one substitution, insertion and/or deletion of a reference CasX protein amino acid sequence. In some embodiments, the reference CasX protein comprises or consists essentially of SEQ ID NO: 2. In some embodiments, a CasX variant protein comprises a substitution of S794R and a substitution of Y797L of SEQ ID NO: 2. In some embodiments, a CasX variant protein comprises a substitution of K416E and a substitution of A708K of SEQ ID NO: 2. In some embodiments, a CasX variant protein comprises a substitution of A708K and a deletion of P793 of SEQ ID NO: 2. In some embodiments, a CasX variant protein comprises a deletion of P793 and an insertion of AS at position 795 SEQ ID NO: 2. In some embodiments, a CasX variant protein comprises a substitution of Q367K and a substitution of I425S of SEQ ID NO: 2. In some embodiments, a CasX variant protein comprises a substitution of A708K, a deletion of P position 793 and a substitution A793V of SEQ ID NO: 2. In some embodiments, a CasX variant protein comprises a substitution of Q338R and a substitution of A339E of SEQ ID NO: 2. In some embodiments, a CasX variant protein comprises a substitution of Q338R and a substitution of A339K of SEQ ID NO: 2. In some embodiments, a CasX variant protein comprises a substitution of S507G and a substitution of G508R of SEQ ID NO: 2. In some embodiments, a CasX variant protein comprises a substitution of L379R, a substitution of A708K and a deletion of P at position 793 of SEQ ID NO: 2. In some embodiments, a CasX variant protein comprises a substitution of C477K, a substitution of A708K and a deletion of P at position 793 of SEQ ID NO: 2. In some embodiments, a CasX variant protein comprises a substitution of L379R, a substitution of C477K, a substitution of A708K and a deletion of P at position of 793 of SEQ ID NO: 2. In some embodiments, a CasX variant protein comprises a substitution of L379R, a substitution of A708K, a deletion of P at position 793 and a substitution A739V of SEQ ID NO: 2. In some embodiments, a CasX variant protein comprises a substitution of C477K, a substitution of A708K, a deletion of P at position 793 and a substitution of A739V of SEQ ID NO: 2. In some embodiments, a CasX variant protein comprises a substitution of L379R, a substitution of C477K, a substitution of A708K, a deletion of P at position 793 and a substitution of A739V of SEQ ID NO: 2. In some embodiments, a CasX variant protein comprises a substitution of L379R, a substitution of A708K, a deletion of P at position 793 and a substitution of M779N of SEQ ID NO: 2. In some embodiments, a CasX variant protein comprises a substitution of L379R, a substitution of A708K, a deletion of P at position 793 and a substitution of M771N of SEQ ID NO: 2. In some embodiments, a CasX variant protein comprises a substitution of L379R, a substitution of 708K, a deletion of P at position 793 and a substitution of D489S of SEQ ID NO: 2. In some embodiments, a CasX variant protein comprises a substitution of L379R, a substitution of A708K, a deletion of P at position 793 and a substitution of A739T of SEQ ID NO: 2. In some embodiments, a CasX variant protein comprises a substitution of L379R, a substitution of A708K, a deletion of P at position 793 and a substitution of D732N of SEQ ID NO: 2. In some embodiments, a CasX variant protein comprises a substitution of L379R, a substitution of A708K, a deletion of P at position 793 and a substitution of G791M of SEQ ID NO: 2. In some embodiments, a CasX variant protein comprises a substitution of L379R, a substitution of 708K, a deletion of P at position 793 and a substitution of Y797L of SEQ ID NO: 2. In some embodiments, a CasX variant protein comprises a substitution of L379R, a substitution of C477K, a substitution of A708K, a deletion of P at position 793 and a substitution of M779N of SEQ ID NO: 2. In some embodiments, a CasX variant protein comprises a substitution of L379R, a substitution of C477K, a substitution of A708K, a deletion of P at position 793 and a substitution of M771N of SEQ ID NO: 2. In some embodiments, a CasX variant protein comprises a substitution of L379R, a substitution of C477K, a substitution of A708K, a deletion of P at position 793 and a substitution of D489S of SEQ ID NO: 2. In some embodiments, a CasX variant protein comprises a substitution of L379R, a substitution of C477K, a substitution of A708K, a deletion of P at position 793 and a substitution of A739T of SEQ ID NO: 2. In some embodiments, a CasX variant protein comprises a substitution of L379R, a substitution of C477K, a substitution of A708K, a deletion of P at position 793 and a substitution of D732N of SEQ ID NO: 2. In some embodiments, a CasX variant protein comprises a substitution of L379R, a substitution of C477K, a substitution of A708K, a deletion of P at position 793 and a substitution of G791M of SEQ ID NO: 2. In some embodiments, a CasX variant protein comprises a substitution of L379R, a substitution of C477K, a substitution of A708K, a deletion of P at position 793 and a substitution of Y797L of SEQ ID NO: 2. In some embodiments, a CasX variant protein comprises a substitution of L379R, a substitution of C477K, a substitution of A708K, a deletion of P at position 793 and a substitution of T620P of SEQ ID NO: 2. In some embodiments, a CasX variant protein comprises a substitution of A708K, a deletion of P at position 793 and a substitution of E386S of SEQ ID NO: 2. In some embodiments, a CasX variant protein comprises a substitution of E386R, a substitution of F399L and a deletion of P at position 793 of SEQ ID NO: 2. In some embodiments, a CasX variant protein comprises a substitution of R581I and A739V of SEQ ID NO: 2. In some embodiments, a CasX variant comprises any combination of the foregoing embodiments of this paragraph.

[0242] In some embodiments, a CasX variant protein comprises more than one substitution, insertion and/or deletion of a reference CasX protein amino acid sequence. In some embodiments, a CasX variant protein comprises a substitution of A708K, a deletion of P at position 793 and a substitution of A739V of SEQ ID NO: 2. In some embodiments, a CasX variant protein comprises a substitution of L379R, a substitution of A708K and a deletion of P at position 793 of SEQ ID NO: 2. In some embodiments, a CasX variant protein comprises a substitution of C477K, a substitution of A708K and a deletion of P at position 793 of SEQ ID NO: 2. In some embodiments, a CasX variant protein comprises a substitution of L379R, a substitution of C477K, a substitution of A708K and a deletion of P at position 793 of SEQ ID NO: 2. In some embodiments, a CasX variant protein comprises a substitution of L379R, a substitution of A708K, a deletion of P at position 793 and a substitution of A739V of SEQ ID NO: 2. In some embodiments, a CasX variant protein comprises a substitution of C477K, a substitution of A708K, a deletion of P at position 793 and a substitution of A739 of SEQ ID NO: 2. In some embodiments, a CasX variant protein comprises a substitution of L379R, a substitution of C477K, a substitution of A708K, a deletion of P at position 793 and a substitution of A739V of SEQ ID NO: 2. In some embodiments, a CasX variant protein comprises a substitution of L379R, a substitution of C477K, a substitution of A708K, a deletion of P at position 793 and a substitution of T620P of SEQ ID NO: 2. In some embodiments, a CasX variant protein comprises a substitution of M771A of SEQ ID NO: 2. In some embodiments, a CasX variant protein comprises a substitution of L379R, a substitution of A708K, a deletion of P at position 793 and a substitution of D732N of SEQ ID NO: 2. In some embodiments, a CasX variant comprises any combination of the foregoing embodiments of this paragraph.

[0243] In some embodiments, a CasX variant protein comprises a substitution of W782Q of SEQ ID NO: 2. In some embodiments, a CasX variant protein comprises a substitution of M771Q of SEQ ID NO: 2. In some embodiments, a CasX variant protein comprises a substitution of R458I and a substitution of A739V of SEQ ID NO: 2. In some embodiments, a CasX variant protein comprises a substitution of L379R, a substitution of A708K, a deletion of P at position 793 and a substitution of M771N of SEQ ID NO: 2. In some embodiments, a CasX variant protein comprises a substitution of L379R, a substitution of A708K, a deletion of P at position 793 and a substitution of A739T of SEQ ID NO: 2. In some embodiments, a CasX variant protein comprises a substitution of L379R, a substitution of C477K, a substitution of A708K, a deletion of P at position 793 and a substitution of D489S of SEQ ID NO: 2. In some embodiments, a CasX variant protein comprises a substitution of L379R, a substitution of C477K, a substitution of A708K, a deletion of P at position 793 and a substitution of D732N of SEQ ID NO: 2. In some embodiments, a CasX variant protein comprises a substitution of V711K of SEQ ID NO: 2. In some embodiments, a CasX variant protein comprises a substitution of L379R, a substitution of C477K, a substitution of A708K, a deletion of P at position 793 and a substitution of Y797L of SEQ ID NO: 2. In some embodiments, a CasX variant protein comprises a substitution of L379R, a substitution of A708K and a deletion of P at position 793 of SEQ ID NO: 2. In some embodiments, a CasX variant protein comprises a substitution of L379R, a substitution of C477K, a substitution of A708K, a deletion of P at position 793 and a substitution of M771N of SEQ ID NO: 2. In some embodiments, a CasX variant protein comprises a substitution of A708K, a substitution of P at position 793 and a substitution of E386S of SEQ ID NO: 2. In some embodiments, a CasX variant protein comprises a substitution of L379R, a substitution of C477K, a substitution of A708K and a deletion of P at position 793 of SEQ ID NO: 2. In some embodiments, a CasX variant protein comprises a substitution of L792D of SEQ ID NO: 2. In some embodiments, a CasX variant protein comprises a substitution of G791F of SEQ ID NO: 2. In some embodiments, a CasX variant protein comprises a substitution of A708K, a deletion of P at position 793 and a substitution of A739V of SEQ ID NO: 2. In some embodiments, a CasX variant protein comprises a substitution of L379R, a substitution of A708K, a deletion of P at position 793 and a substitution of A739V of SEQ ID NO: 2. In some embodiments, a CasX variant protein comprises a substitution of C477K, a substitution of A708K and a substitution of P at position 793 of SEQ ID NO: 2. In some embodiments, a CasX variant protein comprises a substitution of L249I and a substitution of M771N of SEQ ID NO: 2. In some embodiments, a CasX variant protein comprises a substitution of V747K of SEQ ID NO: 2. In some embodiments, a CasX variant protein comprises a substitution of L379R, a substitution of C477, a substitution of A708K, a deletion of P at position 793 and a substitution of M779N of SEQ ID NO: 2. In some embodiments, a CasX variant protein comprises a substitution of F755M. In some embodiments, a CasX variant comprises any combination of the foregoing embodiments of this paragraph.

[0244] In some embodiments, the CasX variant comprises at least one modification in the NTSB domain.

[0245] In some embodiments, the CasX variant comprises at least one modification in the TSL domain. In some embodiments, the at least one modification in the TSL domain comprises an amino acid substitution of one or more of amino acids Y857, S890, or S932 of SEQ ID NO: 2.

[0246] In some embodiments, the CasX variant comprises at least one modification in the helical I domain. In some embodiments, the at least one modification in the helical I domain comprises an amino acid substitution of one or more of amino acids S219, L249, E259, Q252, E292, L307, or D318 of SEQ ID NO: 2.

[0247] In some embodiments, the CasX variant comprises at least one modification in the helical II domain. In some embodiments, the at least one modification in the helical II domain comprises an amino acid substitution of one or more of amino acids D361, L379, E385, E386, D387, F399, L404, R458, C477, or D489 of SEQ ID NO: 2.

[0248] In some embodiments, the CasX variant comprises at least one modification in the OBD domain. In some embodiments, the at least one modification in the OBD comprises an amino acid substitution of one or more of amino acids F536, E552, T620, or 1658 of SEQ ID NO: 2.

[0249] In some embodiments, the CasX variant comprises at least one modification in the RuvC DNA cleavage domain. In some embodiments, the at least one modification in the RuvC DNA cleavage domain comprises an amino acid substitution of one or more of amino acids K682, G695, A708, V711, D732, A739, D733, L742, V747, F755, M771, M779, W782, A788, G791, L792, P793, Y797, M799, Q804, 5819, or Y857 or a deletion of amino acid P793 of SEQ ID NO: 2.

[0250] In some embodiments, a CasX variant protein comprises at least one modification compared to the reference CasX sequence of SEQ ID NO:2, wherein the at least one modification is selected from one or more of: an amino acid substitution of L379R; an amino acid substitution of A708K; an amino acid substitution of T620P; an amino acid substitution of E385P; an amino acid substitution of Y857R; an amino acid substitution of I658V; an amino acid substitution of F399L; an amino acid substitution of Q252K; an amino acid substitution of L404K; and an amino acid deletion of [P793]. In another embodiment, a CasX variant protein comprises any combination of the foregoing substitutions or deletions compared to the reference CasX sequence of SEQ ID NO:2. In another embodiment, the CasX variant protein can, in addition to the foregoing substitutions or deletions, further comprise a substitution of an NTSB and/or a helical 1b domain from the reference CasX of SEQ ID NO:1.

[0251] In some embodiments, a CasX variant protein comprises a sequence set forth in Table 1. In other embodiments, a CasX variant protein comprises a sequence at least 60% identical, at least 65% identical, at least 70% identical, at least 75% identical, at least 80% identical, at least 81% identical, at least 82% identical, at least 83% identical, at least 84% identical, at least 85% identical, at least 86% identical, at least 86% identical, at least 87% identical, at least 88% identical, at least 89% identical, at least 89% identical, at least 90% identical, at least 91% identical, at least 92% identical, at least 93% identical, at least 94% identical, at least 95% identical, at least 96% identical, at least 97% identical, at least 98% identical, at least 99% identical, at least 99.5% identical to a sequence set forth in Table 1. In other embodiments, a CasX variant protein comprises a sequence set forth in Table 1, and further comprises one or more NLS disclosed herein on either the N-terminus, the C-terminus, or both. It will be understood that in some cases, the N-terminal methionine of the CasX variants of the Table is removed from the expressed CasX variant during post-translational modification.

TABLE 1
CasX Variant Sequences

| Description* | SEQ ID NO |
|---|---|
| TSL, Helical I, Helical II, OBD and RuvC domains from SEQ ID NO: 2 | 252 |
| and an NTSB domain from SEQ ID NO: 1 | |
| NTSB, Helical I, Helical II, OBD and RuvC domains from SEQ ID NO: 2 | 253 |
| and a TSL domain from SEQ ID NO: 1. | |
| TSL, Helical I, Helical II, OBD and RuvC domains from SEQ ID NO: 1 | 254 |
| and an NTSB domain from SEQ ID NO: 2 | |
| NTSB, Helical I, Helical II, OBD and RuvC domains from SEQ ID NO: 1 | 255 |
| and an TSL domain from SEQ ID NO: 2. | |
| NTSB, TSL, Helical I, Helical II and OBD domains SEQ ID NO: 2 and an | 256 |
| exogenous RuvC domain or a portion thereof from a second CasX protein. | |
| No description | 257 |
| NTSB, TSL, Helical II, OBD and RuvC domains from SEQ ID NO: 2 and | 258 |
| a Helical I domain from SEQ ID NO: 1 | |
| NTSB, TSL, Helical I, OBD and RuvC domains from SEQ ID NO: 2 and a | 259 |
| Helical II domain from SEQ ID NO: 1 | |
| NTSB, TSL, Helical I, Helical II and RuvC domains from a first CasX | 260 |
| protein and an exogenous OBD or a part thereof from a second CasX protein | |
| No description | 261 |
| No description | 262 |
| substitution of L379R, a substitution of C477K, a substitution of A708K, a | 263 |
| deletion of P at position 793 and a substitution of T620P of SEQ ID NO: 2 | |
| substitution of M771A of SEQ ID NO: 2. | 264 |
| substitution of L379R, a substitution of A708K, a deletion of P at position | 265 |
| 793 and a substitution of D732N of SEQ ID NO: 2. | |
| substitution of W782Q of SEQ ID NO: 2. | 266 |
| substitution of M771Q of SEQ ID NO: 2 | 267 |
| substitution of R458I and a substitution of A739V of SEQ ID NO: 2. | 268 |
| L379R, a substitution of A708K, a deletion of P at position 793 and a | 269 |
| substitution of M771N of SEQ ID NO: 2 | |
| substitution of L379R, a substitution of A708K, a deletion of P at position | 270 |
| 793 and a substitution of A739T of SEQ ID NO: 2 | |
| substitution of L379R, a substitution of C477K, a substitution of A708K, a | 271 |
| deletion of P at position 793 and a substitution of D489S of SEQ ID NO: 2. | |
| substitution of L379R, a substitution of C477K, a substitution of A708K, a | 272 |
| deletion of P at position 793 and a substitution of D732N of SEQ ID NO: 2. | |
| substitution of V711K of SEQ ID NO: 2. | 273 |
| substitution of L379R, a substitution of C477K, a substitution of A708K, a | 274 |
| deletion of P at position 793 and a substitution of Y797L of SEQ ID NO: 2. | |
| 119, substitution of L379R, a substitution of A708K and a deletion of P at | 275 |
| position 793 of SEQ ID NO: 2. | |
| substitution of L379R, a substitution of C477K, a substitution of A708K, a | 276 |
| deletion of P at position 793 and a substitution of M771N of SEQ ID NO: 2. | |
| substitution of A708K, a deletion of P at position 793 and a substitution of | 277 |
| E386S of SEQ ID NO: 2. | |
| substitution of L379R, a substitution of C477K, a substitution of A708K | 278 |
| and a deletion of P at position 793 of SEQ ID NO: 2. | |
| substitution of L792D of SEQ ID NO: 2. | 279 |
| substitution of G791F of SEQ ID NO: 2. | 280 |
| substitution of A708K, a deletion of P at position 793 and a substitution of | 281 |
| A739V of SEQ ID NO: 2. | |
| substitution of L379R, a substitution of A708K, a deletion of P at position | 282 |
| 793 and a substitution of A739V of SEQ ID NO: 2. | |
| substitution of C477K, a substitution of A708K and a deletion of P at | 283 |
| position 793 of SEQ ID NO: 2. | |
| substitution of L249I and a substitution of M771N of SEQ ID NO: 2. | 284 |
| substitution of V747K of SEQ ID NO: 2. | 285 |
| substitution of L379R, a substitution of C477K, a substitution of A708K, a | 286 |
| deletion of P at position 793 and a substitution of M779N of SEQ ID NO: 2. | |
| L379R, F755M | 287 |
| 429, L379R, A708K, P793_, Y857R | 288 |
| 430, L379R, A708K, P793_, Y857R, I658V | 289 |
| 431, L379R, A708K, P793_, Y857R, I658V, E386N | 290 |
| 432, L379R, A708K, P793_, Y857R, I658V, L404K | 291 |
| 433, L379R, A708K, P793_, Y857R, I658V, \hat{ }V192 | 292 |
| 434, L379R, A708K, P793_, Y857R, I658V, L404K, E386N | 293 |
| 435, L379R, A708K, P793_, Y857R, I658V, F399L | 294 |
| 436, L379R, A708K, P793_, Y857R, I658V, F399L, E386N | 295 |
| 437, L379R, A708K, P793_, Y857R, I658V, F399L, C477S | 296 |
| 438, L379R, A708K, P793_, Y857R, I658V, F399L, L404K | 297 |
| 439, L379R, A708K, P793_, Y857R, I658V, F399L, E386N, C477S, L404K | 298 |
| 440, L379R, A708K, P793_, Y857R, I658V, F399L, Y797L | 299 |
| 441, L379R, A708K, P793_, Y857R, I658V, F399L, Y797L, E386N | 300 |
| 442, L379R, A708K, P793_, Y857R, I658V, F399L, Y797L, E386N, | 301 |
| C477S, L404K | |
| 443, L379R, A708K, P793_, Y857R, I658V, Y797L | 302 |
| 444, L379R, A708K, P793_, Y857R, I658V, Y797L, L404K | 303 |
| 445, L379R, A708K, P793_, Y857R, I658V, Y797L, E386N | 304 |
| 446, L379R, A708K, P793_, Y857R, I658V, Y797L, E386N, C477S, L404K | 305 |
| 447, L379R, A708K, P793_, Y857R, E386N | 306 |
| 448, L379R, A708K, P793_, Y857R, E386N, L404K | 307 |
| 449, L379R, A708K, P793_, D732N, E385P, Y857R | 308 |
| 450, L379R, A708K, P793_, D732N, E385P, Y857R, I658V | 309 |
| 451, L379R, A708K, P793_, D732N, E385P, Y857R, I658V, F399L | 310 |
| 452, L379R, A708K, P793_, D732N, E385P, Y857R, I658V, E386N | 311 |
| 453, L379R, A708K, P793_, D732N, E385P, Y857R, I658V, L404K | 312 |
| 454, L379R, A708K, P793_, T620P, E385P, Y857R, Q252K | 313 |
| 455, L379R, A708K, P793_, T620P, E385P, Y857R, I658V, Q252K | 314 |
| 456, L379R, A708K, P793_, T620P, E385P, Y857R, I658V, E386N, Q252K | 315 |
| 457, L379R, A708K, P793_, T620P, E385P, Y857R, I658V, F399L, Q252K | 316 |
| 458, L379R, A708K, P793_, T620P, E385P, Y857R, I658V, L404K, Q252K | 317 |
| 459, L379R, A708K, P793_, T620P, Y857R, I658V, E386N | 318 |
| 460, L379R, A708K, P793_, T620P, E385P, Q252K | 319 |
| 278 | 320 |
| 279 | 321 |
| 280 | 322 |
| 285 | 323 |
| 286 | 324 |
| 287 | 325 |
| 288 | 326 |
| 290 | 327 |
| 291 | 328 |
| 293 | 329 |
| 300 | 330 |
| 492 | 331 |
| 493 | 332 |
| 387 | 333 |
| 395 | 334 |
| 485 | 335 |
| 486 | 336 |
| 487 | 337 |
| 488 | 338 |
| 489 | 339 |
| 490 | 340 |
| 491 | 341 |
| 494 | 342 |
| 387 | 343 |
| 395 | 344 |
| 485 | 345 |
| 486 | 346 |
| 487 | 347 |
| 488 | 348 |
| 489 | 349 |
| 490 | 350 |
| 491 | 351 |
| 494 | 352 |
| 328, S867G | 4229 |
| 388, L379R + A708K + [P793] + X1 Helical2 swap | 4230 |
| 389, L379R + A708K + [P793] + X1 RuvC1 swap | 4231 |
| 390, L379R + A708K + [P793] + X1 RuvC2 swap | 4232 |

*Strain indicated numerically; changes, where indicated, are relative to SEQ ID NO: 2

[0252] In some embodiments, the CasX variant protein comprises between 400 and 2000 amino acids, between 500 and 1500 amino acids, between 700 and 1200 amino acids, between 800 and 1100 amino acids or between 900 and 1000 amino acids.

[0253] In other embodiments, the variant is RNA, and the one or more improved characteristics are independently selected from the group consisting of improved stability, improved solubility, improved resistance to nuclease activity, and improved binding to a binding partner.

[0254] In some embodiments, the variant is a guide RNA that binds to a CRISPR associated protein, and the one or more improved characteristics are independently selected from the group consisting of improved stability, improved solubility, improved resistance to nuclease activity, improved binding affinity to a Cas protein, improved binding affinity to a target DNA, improved gene editing, and improved specificity. In some embodiments, the variant is a guide RNA, wherein the variant has one or more altered activities compared to a reference. In some embodiments, the variant guide RNA has altered PAM specificity compared to a reference gRNA, for example has specificity for a different PAM sequence than the reference guide RNA.

[0255] In some embodiments, wherein the variant is a guide RNA variant, the one or more improved characteristics are improved compared to a reference gRNA of SEQ ID NO: 4. In other embodiments, wherein the variant is a guide RNA variant, the one or more improved characteristics are improved compared to a reference gRNA of SEQ ID NO: 5.

[0256] In still further embodiments, the variant is DNA. In some embodiments, the DNA variant encodes an RNA variant or protein variant. In certain embodiments, the encoded RNA or DNA has one or more improved characteristics as described herein.

[0257] In some embodiments, a biomolecule variant produced by the methods disclosed herein (e.g., protein variant, RNA variant, or DNA variant) has improved stability relative to a reference biomolecule. In some embodiments, improved stability of the variant results in expression of a higher steady state of the variant, or a larger fraction of expressed variant that remains folded in a functional conformation. In some embodiments, increased stability relative to the reference results in needing a lower concentration of the variant for use in a functional context, for example in gene editing. Thus, in some embodiments, the variant has improved efficiency compared to a reference in one or more functional contexts, which may include gene editing. In some embodiments, wherein the biomolecule is a Cas protein or guide RNA, the variant has improved stability of the variant Cas protein:guide-NA complex (e.g., a Cas protein:guide-RNA complex) relative to the reference biomolecule. Improved stability of the complex may, in some embodiments, lead to improved editing efficiency. In some embodiments, improved stability includes faster folding kinetics, or slower unfolding kinetics, or a larger free energy release upon folding, or a higher temperature at which 50% of the biomolecule is unfolded (Tm), or any combinations thereof, relative to the reference biomolecule. In some embodiments, folding kinetics of the biomolecule variant are improved relative to a reference biomolecule by at least about 1 kJ/mol, at least about 5 kJ/mol, at least about 10 kJ/mol, at least about 20 kJ/mol, at least about 30 kJ/mol, at least about 40 kJ/mol, at least about 50 kJ/mol, at least about 60 kJ/mol, at least about 70 kJ/mol, at least about 80 kJ/mol, at least about 90 kJ/mol, at least about 100 kJ/mol, at least about 150 kJ/mol, at least about 200 kJ/mol, at least about 250 kJ/mol, at least about 300 kJ/mol, at least about 350 kJ/mol, at least about 400 kJ/mol, at least about 450 kJ/mol, or at least about 500 kJ/mol. In some embodiments, improved stability of comprises a higher Tm relative to a reference biomolecule. In some embodiments, the Tm of the biomolecule protein variant is between about 20° C. to about 30° C., between about 30° C. to about 40° C., between about 40° C. to about 50° C., between about 50° C. to about 60° C., between about 60° C. to about 70° C., between about 70° C. to about 80° C., between about 80° C. to about 90° C. or between about 90° C. to about 100° C.

[0258] In some embodiments, a biomolecule variant has improved thermostability relative to a reference biomolecule. In some embodiments, a biomolecule variant as described herein has improved thermostability compared to a reference biomolecule at a temperature of at least 20° C., at least 22° C., at least 24° C., at least 26° C., at least 28° C., at least 30° C., at least 32° C., at least 34° C., at least 35° C., at least 36° C., at least 37° C., at least 38° C., at least 39° C., at least 40° C., at least 41° C., at least 42° C., at least 43° C., at least 44° C., at least 45° C., at least 46° C., at least 47° C., at least 48° C., at least 49° C., at least 50° C., at least 52° C., or greater, or between 10° C. to 60° C., between 10° C. to 50° C., between 10° C. to 40° C., between 20° C. to 40° C., or between 30° C. to 40° C. In certain variations, improved thermostability includes a higher proportion of the biomolecule remains soluble, a higher proportion of the biomolecule remains in a folded state, a higher proportion of the biomolecule retains activity, or a higher proportion of the biomolecule has a greater level of activity, or any combinations thereof, relative to the reference. In some embodiments, wherein the biomolecule is a Cas protein or guide RNA, a biomolecule variant has improved thermostability of a Cas protein:guide-NA complex compared to the reference biomolecule (e.g., a Cas protein:guide-RNA complex).

[0259] Methods of measuring characteristics of protein stability such as Tm and the free energy of unfolding are known to persons of ordinary skill in the art, and can be measured using standard biochemical techniques in vitro. For example, Tm may be measured using Differential Scanning calorimetry, a thermoanalytical technique in which the difference in the amount of heat required to increase the temperature of a sample and a reference is measured as a function of temperature. Alternatively, or in addition, biomolecule Tm may be measured using commercially available methods such as the ThermoFisher Protein Thermal Shift system. Alternatively, or in addition, circular dichroism may be used to measure the kinetics of folding and unfolding, as well as the Tm. Circular dichroism (CD) relies on the unequal absorption of left-handed and right-handed circularly polarized light by asymmetric molecules such as proteins. Certain structures of proteins, for example alpha-helices and beta-sheets, have characteristic CD spectra. Accordingly, in some embodiments, CD may be used to determine the secondary structure of a biomolecule.

[0260] Exemplary amino acid changes that can increase the stability of a protein variant relative to a reference protein may include, but are not limited to, amino acid changes that increase the number of hydrogen bonds within the protein variant, increase the number of disulfide bridges within the protein variant, increase the number of salt bridges within the protein variant, strengthen interactions between parts of the protein variant, increase the number of electrostatic interactions, or any combinations thereof, relative to the reference protein.

[0261] In some embodiments, the biomolecule variant has improved solubility compared to a reference biomolecule. In certain embodiments, wherein the biomolecule is a protein, an improvement in protein solubility leads to higher yield of protein from protein purification techniques such as purification from E. coli. Improved solubility of protein variants may, in some embodiments, enable more efficient activity in cells, as a more soluble protein may be less likely to aggregate in cells. Protein aggregates can in certain embodiments be toxic or burdensome on cells, and, without wishing to be bound by any theory, increased solubility of a protein variant may ameliorate this result of protein aggregation. Further, improved solubility of protein variants (such as CasX variants) may allow for the delivery of a higher effective dose of functional protein, for example in a desired gene editing application. In some embodiments, improved solubility of a protein variant relative to a reference protein results in improved yield of the protein variant during purification of a factor of at least about 5, at least about 10, at least about 20, at least about 30, at least about 40, at least about 50, at least about 60, at least about 70, at least about 80, at least about 90, at least about 100, at least about 250, at least about 500, or at least about 1000. In some embodiments, improved solubility of a protein variant relative to a reference protein improves activity of the protein variant in cells by a factor of at least about 1.1, at least about 1.2, at least about 1.3, at least about 1.4, at least about 1.5, at least about 1.6, at least about 1.7, at least about 1.8, at least about 1.9, at least about 2, at least about 2.1, at least about 2.2, at least about 2.3, at least about 2.4, at least about 2.5, at least about 2.6, at least about 2.7, at least about 2.8, at least about 2.9, at least about 3, at least about 3.5, at least about 4, at least about 4.5, at least about 5, at least about 5.5, at least about 6, at least about 6.5, at least about 7.0, at least about 7.5, at least about 8, at least about 8.5, at least about 9, at least about 9.5, at least about 10, at least about 11, at least about 12, at least about 13, at least about 14, or at least about 15. In some embodiments, the activity in cells of the variant relative to the CasX reference protein is improved by a factor of about 2, about 3, about 4, about 5, about 6, about 7, about 8, about 9, or about 10. In some embodiments, the protein variant is a CasX variant.

[0262] Methods of measuring protein solubility, and improvements thereof in protein variants, will be readily apparent to the person of ordinary skill in the art. For example, protein variant solubility can in some embodiments be measured by taking densitometry readings on a gel of the soluble fraction of lysed E. coli. Alternatively, or addition, improvements in protein variant solubility can be measured by measuring the maintenance of soluble protein product through the course of a full protein purification. For example, soluble protein product can be measured at one or more steps of gel affinity purification, tag cleavage, cation exchange purification, and/or running the protein on a sizing column. In some embodiments, the densitometry of every band of protein on a gel is read after each step in the purification process. Variant proteins with improved solubility may, in some embodiments, maintain a higher concentration at one or more steps in the protein purification process when compared to the reference protein, while an insoluble protein variant may be lost at one or more steps due to buffer exchanges, filtration steps, interactions with a purification column, and the like.

[0263] In some embodiments, improving the solubility of protein variants results in a higher yield in terms of mg/L of protein during protein purification when compared to a reference protein.

[0264] In some embodiments, improving the solubility of CasX variant proteins enables a greater amount of editing events compared to a less soluble protein when assessed in editing assays such as the EGFP disruption assays described herein.

[0265] In some embodiments, a biomolecule variant has improved resistance to degradative activity compared to a reference biomolecule, such as an improved resistance to nuclease (e.g., when the biomolecule is RNA) or protease (e.g., when the biomolecule is a protein) activity. In some such embodiments, increased resistance to degradative activity may result in improved functional activity.

[0266] In some embodiments, a biomolecule variant has improved affinity for a binding partner relative to a reference biomolecule. For example, in some embodiments, the biomolecule is a Cas protein, and the Cas protein variant has greater affinity for a gRNA than the reference Cas protein. In other embodiments, the biomolecule is a gRNA, and the gRNA variant has greater affinity for a Cas protein binding partner than the reference gRNA. In some embodiments, increased affinity of a biomolecule variant for a binding partner results in increased stability of the binding complex, such as when delivered to human cells. This increased stability can affect function and utility of the complex (e.g., in the cells of a subject, or intravenously). In some embodiments, increased affinity of a biomolecule variant and the resulting increased stability of the target complex results in lower levels of complex being needed to achieve the same functional outcome as when using the reference biomolecule. In certain embodiments, for example wherein the biomolecule is a gRNA or a Cas protein, the binding partner is DNA. In certain embodiments, a ribonucleoprotein complex comprising a gRNA variant or Cas protein variant has improved affinity for target nucleic acid (e.g., DNA or RNA), relative to the affinity of an RNP comprising a reference biomolecule. In some embodiments, the target nucleic acid is DNA, such as dsDNA or ssDNA. In other embodiments, the target nucleic acid is RNA. In some embodiments, the improved affinity of the RNP for the target nucleic acid comprises improved affinity for the target sequence, improved affinity for the PAM sequence, improved ability of the RNP to search the nucleic acid for the target sequence, or any combinations thereof. In some embodiments, the improved affinity for the target nucleic acid is the result of increased overall nucleic acid binding affinity. In some embodiments, wherein the biomolecule variant is a gRNA variant, one or more mutations in the gRNA variant may result in an increase of affinity of a Cas protein partner for the protospacer adjacent motif (PAM), thereby increasing affinity of the Cas protein partner for target nucleic acid, when complexed with the gRNA. In some embodiments, the protein variant has an altered PAM specificity (e.g., specificity for a different PAM) compared to a reference gRNA. Methods of evaluating biomolecule affinity for a binding partner are readily known to one of skill in the art, and may include, for example, fluorescence polarization, biolayer interferometry, electrophoretic mobility shift assays (EMSAs), filter binding, isothermal calorimetry (ITC), and surface plasmon resonance (SPR). In some embodiments, the K_{d} of a Cas protein variant for a gRNA (for example, a CasX variant protein for a gRNA) is increased relative to a reference Cas protein by a factor of at least about 1.1, at least about 1.2, at least about 1.3, at least about 1.4, at least about 1.5, at least about 1.6, at least about 1.7, at least about 1.8, at least about 1.9, at least about 2, at least about 3, at least about 4, at least about 5, at least about 6, at least about 7, at least about 8, at least about 9, at least about 10, at least about 15, at least about 20, at least about 25, at least about 30, at least about 35, at least about 40, at least about 45, at least about 50, at least about 60, at least about 70, at least about 80, at least about 90, or at least about 100.

[0267] In some embodiments, a Cas protein variant has improved specificity for a target nucleic acid (e.g., DNA such as dsDNA or ssDNA, or RNA) relative to a reference Cas protein. Improved specificity may include, for example, the degree to which a CRISPR/Cas system ribonucleoprotein complex cleaves off-target sequences that are similar, but not identical to the target nucleic acid. In some embodiments, a Cas protein variant has improved specificity for a target site within the target sequence that is complementary to the Spacer sequence of the gRNA. Methods of evaluating Cas protein (such as variant or reference) target specificity may include guide and Circularization for In vitro Reporting of Cleavage Effects by Sequencing (CIRCLE-seq); and assays used to detect and quantify indels (insertions and deletions) formed at selected off-target sites, such as mismatch-detection nuclease assays and next generation sequencing (NGS).

[0268] In some embodiments, wherein the biomolecule is a Cas protein, the Cas protein variant has improved ability of unwinding DNA relative to a reference Cas protein. In some embodiments, a Cas protein variant has enhanced DNA unwinding characteristics. Methods of measuring the ability of Cas proteins (such as variant or reference) to unwind DNA include, but are not limited to, in vitro assays that observe increased on rates of dsDNA targets in fluorescence polarization or biolayer interferometry. In some embodiments, affinity of a Cas protein variant (such as a CasX variant protein) for a target DNA molecule is increased relative to a reference Cas protein by a factor of at least about 1.1, at least about 1.2, at least about 1.3, at least about 1.4, at least about 1.5, at least about 1.6, at least about 1.7, at least about 1.8, at least about 1.9, at least about 2, at least about 3, at least about 4, at least about 5, at least about 6, at least about 7, at least about 8, at least about 9, at least about 10, at least about 15, at least about 20, at least about 25, at least about 30, at least about 35, at least about 40, at least about 45, at least about 50, at least about 60, at least about 70, at least about 80, at least about 90, or at least about 100.

[0269] In some embodiments, a ribonucleoprotein complex comprising a biomolecule variant as described herein has improved catalytic activity compared to a reference biomolecule. For example, wherein the biomolecule is a catalytic protein (such as a Cas protein), in certain embodiments the biomolecule variant has improved catalytic efficiency, specificity, or activity, compared to a reference biomolecule. Such catalytic activity may include cleavage of a nucleic acid sequence (e.g., DNA such as dsDNA or ssDNA, or RNA) wherein the biomolecule is a Cas protein. In some embodiments, improved affinity for nucleotides of a Cas protein variant also improves the function of catalytically inactive versions of the Cas protein variant (such as a CasX variant protein). In some embodiments, the catalytically inactive version of the Cas protein variant comprises one or mutations the DED motif in the RuvC. Catalytically dead Cas protein variants can, in some embodiments, be used for base editing or epigenetic modifications. With a higher affinity for nucleotides, in some embodiments catalytically dead Cas protein variants can find their target nucleic acid faster, remain bound to target nucleic acid for longer periods of time, bind target nucleic acid in a more stable fashion, or a combination thereof, thereby improving the function of the catalytically dead Cas protein variant.

[0270] In some embodiments, wherein a reduction of a certain characteristic is a desired trait, a biomolecule variant obtained through the methods described herein has said desired reduction. Such embodiments may result in a biomolecule variant that is better suited for a certain task.

[0271] In some embodiments, the one or more improved characteristics of the variant have an improvement by a factor of at least 1.1, at least 1.2, at least 1.3, at least 1.4, at least 1.5, at least 5, at least 10, at least 20, at least 30, at least 40, at least 50, at least 60, at least 70, at least 80, at least 90, at least 100, at least 125, at least 150, at least 175, or at least 200 fold compared to the reference biomolecule. In some embodiments, the improvement is between 1.1 to 5, between 1.1 to 10, between 1.1 to 20, between 5 to 10, between 5 to 20, between 5 to 50, between 10 to 20, between 10 to 30, between 10 to 50, between 10 to 100, between 50 to 100, between 50 to 150, between 50 to 200, between 70 to 100, between 70 to 150, between 100 to 150, between 100 to 200, or between 150 to 200 fold compared to the reference biomolecule. In still further embodiments, the one or more improved characteristics of the variant have an improvement of greater than 1.1, greater than 1.2, greater than 1.3, greater than 1.4, greater than 1.5, greater than 5, greater than 10, greater than 20, greater than 30, greater than 40, greater than 50, greater than 60, greater than 70, greater than 80, greater than 90, greater than 100, greater than 125, greater than 150, greater than 175, or greater than 200, compared to the reference biomolecule.

[0272] In some embodiments, the variant comprises at least one improved characteristic. In other embodiments, the variant comprises at least two improved characteristics. In further embodiments, the variant comprises at least three improved characteristics. In some embodiments, the variant comprises at least four improved characteristics. In still further embodiments, the variant comprises at least five, at least six, at least seven, at least eight, at least nine, at least ten, at least eleven, at least twelve, at least thirteen, or more improved characteristics.

[0273] In certain embodiments, wherein the variant is a protein, the variant comprises between 2 and 10,000 amino acids, between 100 and 10,000 amino acids, between 100 and 8,000 amino acids, between 100 and 6,000 amino acids, between 100 and 5,000 amino acids, between 100 and 4,000 amino acids, between 100 and 3,000 amino acids, between 100 and 2,000 amino acids, between 100 and 1,000 amino acids, between 100 and 1,500 amino acids, between 500 and 1,000 amino acids, between 500 and 1,500 amino acids, between 500 and 2,000 amino acids, between 1,000 and 3,000 amino acids, between 1,000 and 2,000 amino acids, between 2,000 and 10,000 amino acids, between 4,000 and 10,000 amino acids, between 6,000 and 10,000 amino acids, or between 8,000 and 10,000 amino acids.

[0274] In certain embodiments, wherein the variant is RNA or DNA, the variant comprises between 2 and 10,000 nucleotides, between 2 to 5,000 nucleotides, between 2 to 2,000 nucleotides, between 2 to 1,000 nucleotides, between 2 to 500 nucleotides, between 2 to 300 nucleotides, between 2 to 200 nucleotides, between 2 to 150 nucleotides, between 50 to 300 nucleotides, between 50 to 200 nucleotides, between 50 to 150 nucleotides, between 50 to 100 nucleotides, between 100 and 10,000 nucleotides, between 100 and 8,000 nucleotides, between 100 and 6,000 nucleotides, between 100 and 5,000 nucleotides, between 100 and 4,000 nucleotides, between 100 and 3,000 nucleotides, between 100 and 2,000 nucleotides, between 100 and 1,000 nucleotides, between 100 and 150 nucleotides, between 100 and 200 nucleotides, between 500 and 1,000 nucleotides, between 500 and 1,500 nucleotides, between 500 and 2,000 nucleotides, between 1,000 and 3,000 nucleotides, between 1,000 and 2,000 nucleotides, between 2,000 and 10,000 nucleotides, between 4,000 and 10,000 nucleotides, between 6,000 and 10,000 nucleotides, or between 8,000 and 10,000 nucleotides. In some embodiments, the variant is RNA. In certain embodiments, the RNA is a CRISPR associated guide RNA, the size of the variant excludes the size of the spacer region.

[0275] Table 2 provides the sequences of reference gRNAs tracr, cr and scaffold sequences. In some embodiments, the disclosure provides gNA sequences wherein the gNA has a scaffold comprising a sequence having at least one nucleotide modification relative to a reference gNA sequence having a sequence of any one of SEQ ID NOS: 4-16 of Table 2. It will be understood that in those embodiments wherein a vector comprises a DNA encoding sequence for a gNA, or where a gNA is a gDNA or a chimera of RNA and DNA, that thymine (T) bases can be substituted for the uracil (U) bases of any of the gNA sequence embodiments described herein.

TABLE 2
Reference gRNA tracr, cr and scaffold sequences

| SEQ ID NO. | Nucleotide Sequence |
|---|---|
| 4 | ACAUCUGGCGCGUUUAUUCCAUUACUUUGGAGCCAGUCCCAGCGACUAUGUCG |
| | UAUGGACGAAGCGCUUAUUUAUCGGAGAGAAACCGAUAAGUAAAACGCAUCAA |
| | AG |
| 5 | UACUGGCGCUUUUAUCUCAUUACUUUGAGAGCCAUCACCAGCGACUAUGUCGU |
| | AUGGGUAAAGCGCUUAUUUAUCGGAGAGAAAUCCGAUAAAUAAGAAGCAUCAA |
| | AG |
| 6 | ACAUCUGGCGCGUUUAUUCCAUUACUUUGGAGCCAGUCCCAGCGACUAUGUCG |
| | UAUGGACGAAGCGCUUAUUUAUCGGAGA |
| 7 | ACAUCUGGCGCGUUUAUUCCAUUACUUUGGAGCCAGUCCCAGCGACUAUGUCG |
| | UAUGGACGAAGCGCUUAUUUAUCGG |
| 8 | UACUGGCGCUUUUAUCUCAUUACUUUGAGAGCCAUCACCAGCGACUAUGUCGU |
| | AUGGGUAAAGCGCUUAUUUAUCGGAGA |
| 9 | UACUGGCGCUUUUAUCUCAUUACUUUGAGAGCCAUCACCAGCGACUAUGUCGU |
| | AUGGGUAAAGCGCUUAUUUAUCGG |
| 10 | GUUUACACACUCCCUCUCAUAGGGU |
| 11 | GUUUACACACUCCCUCUCAUGAGGU |
| 12 | UUUUACAUACCCCCUCUCAUGGGAU |
| 13 | GUUUACACACUCCCUCUCAUGGGGG |
| 14 | CCAGCGACUAUGUCGUAUGG |
| 15 | GCGCUUAUUUAUCGGAGAGAAAUCCGAUAAAUAAGAAGC |
| 16 | GGCGCUUUUAUCUCAUUACUUUGAGAGCCAUCACCAGCGACUAUGUCGUAUGG |
| | GUAAAGCGCUUAUUUAUCGGA |

[0276] In another aspect, the disclosure relates to guide nucleic acid variants (referred to herein alternatively as “gNA variant” or “gRNA variant”), which comprise one or more modifications relative to a reference gRNA scaffold. As used herein, “scaffold” refers to all parts to the gNA necessary for gNA function with the exception of the spacer sequence.

[0277] In some embodiments, a gNA variant comprises one or more nucleotide substitutions, insertions, deletions, or swapped or replaced regions relative to a reference gRNA sequence of the disclosure. In some embodiments, a mutation can occur in any region of a reference gRNA to produce a gNA variant. In some embodiments, the scaffold of the gNA variant sequence has at least 20%, at least 30%, at least 40%, at least 50%, at least 60%, or at least 70%, at least 80%, at least 85%, at least about 90%, at least about 95%, at least about 96%, at least about 97%, at least about 98%, or at least about 99% identity to the sequence of SEQ ID NO: 4 or SEQ ID NO: 5.

[0278] In some embodiments, a gNA variant comprises one or more nucleotide changes within one or more regions of the reference gRNA that improve a characteristic of the reference gRNA. Exemplary regions include the RNA triplex, the pseudoknot, the scaffold stem loop, and the extended stem loop. In some cases, the variant scaffold stem further comprises a bubble. In other cases, the variant scaffold further comprises a triplex loop region. In still other cases, the variant scaffold further comprises a 5′ unstructured region. In one embodiment, the gNA variant scaffold comprises a scaffold stem loop having at least 60% sequence identity to SEQ ID NO: 14. In another embodiment, the gNA variant comprises a scaffold stem loop having the sequence of CCAGCGACUAUGUCGUAGUGG (SEQ ID NO: 353).

[0279] All gNA variants that have one or more improved functions or characteristics, or add one or more new functions when the variant gNA is compared to a reference gRNA described herein, are envisaged as within the scope of the disclosure. A representative example of such a gNA variant created by the methods described herein is guide 174 (SEQ ID NO: 2238), the design of which is described in the Examples. In some embodiments, the gNA variant adds a new function to the RNP comprising the gNA variant. In some embodiments, the gNA variant has an improved characteristic selected from: improved stability; improved solubility; improved transcription of the gNA; improved resistance to nuclease activity; increased folding rate of the gNA; decreased side product formation during folding; increased productive folding; improved binding affinity to a CasX protein; improved binding affinity to a target DNA when complexed with a CasX protein; improved gene editing when complexed with a CasX protein; improved specificity of editing when complexed with a CasX protein; and improved ability to utilize a greater spectrum of one or more PAM sequences, including ATC, CTC, GTC, or TTC, in the editing of target DNA when complexed with a CasX protein, or any combination thereof. In some cases, the one or more of the improved characteristics of the gNA variant is at least about 1.1 to about 100,000-fold improved relative to the reference gNA of SEQ ID NO: 4 or SEQ ID NO: 5. In other cases, the one or more of the improved characteristics of the gNA variant is at least about 1.1, at least about 10, at least about 100, at least about 1000, at least about 10,000, at least about 100,000-fold or more improved relative to the reference gNA of SEQ ID NO: 4 or SEQ ID NO: 5. In other cases, the one or more of the improved characteristics of the gNA variant is about 1.1 to 100,00×, about 1.1 to 10,00×, about 1.1 to 1,000×, about 1.1 to 500×, about 1.1 to 100×, about 1.1 to 50×, about 1.1 to 20×, about 10 to 100,00×, about 10 to 10,00×, about 10 to 1,000×, about 10 to 500×, about 10 to 100×, about 10 to 50×, about 10 to 20×, about 2 to 70×, about 2 to 50×, about 2 to 30×, about 2 to 20×, about 2 to 10×, about 5 to 50×, about 5 to 30×, about 5 to 10×, about 100 to 100,00×, about 100 to 10,00×, about 100 to 1,000×, about 100 to 500×, about 500 to 100,00×, about 500 to 10,00×, about 500 to 1,000×, about 500 to 750×, about 1,000 to 100,00×, about 10,000 to 100,00×, about 20 to 500×, about 20 to 250×, about 20 to 200×, about 20 to 100×, about 20 to 50×, about 50 to 10,000×, about 50 to 1,000×, about 50 to 500×, about 50 to 200×, or about 50 to 100×, improved relative to the reference gNA of SEQ ID NO: 4 or SEQ ID NO: 5. In other cases, the one or more of the improved characteristics of the gNA variant is about 1.1×, 1.2×, 1.3×, 1.4×, 1.5×, 1.6×, 1.7×, 1.8×, 1.9×, 2×, 3×, 4×, 5×, 6×, 7×, 8×, 9×, 10×, 11×, 12×, 13×, 14×, 15×, 16×, 17×, 18×, 19×, 20×, 25×, 30×, 40×, 45×, 50×, 55×, 60×, 70×, 80×, 90×, 100×, 110×, 120×, 130×, 140×, 150×, 160×, 170×, 180×, 190×, 200×, 210×, 220×, 230×, 240×, 250×, 260×, 270×, 280×, 290×, 300×, 310×, 320×, 330×, 340×, 350×, 360×, 370×, 380×, 390×, 400×, 425×, 450×, 475×, or 500× improved relative to the reference gNA of SEQ ID NO: 4 or SEQ ID NO: 5.

[0280] In some embodiments, a gNA variant can be created by subjecting a reference gRNA to a one or more mutagenesis methods, such as the mutagenesis methods described herein, below, which may include Deep Mutational Evolution (DME), deep mutational scanning (DMS), error prone PCR, cassette mutagenesis, random mutagenesis, staggered extension PCR, gene shuffling, or domain swapping, in order to generate the gNA variants of the disclosure. The activity of reference gRNAs may be used as a benchmark against which the activity of gNA variants are compared, thereby measuring improvements in function of gNA variants. In other embodiments, a reference gRNA may be subjected to one or more deliberate, targeted mutations, substitutions, or domain swaps in order to produce a gNA variant, for example a rationally designed variant. Exemplary gRNA variants produced by such methods are described in the Examples and representative sequences of gNA scaffolds are presented in Table 3.

[0281] In some embodiments, the gNA variant comprises one or more modifications compared to a reference guide nucleic acid scaffold sequence, wherein the one or more modification is selected from: at least one nucleotide substitution in a region of the gNA variant; at least one nucleotide deletion in a region of the gNA variant; at least one nucleotide insertion in a region of the gNA variant; a substitution of all or a portion of a region of the gNA variant; a deletion of all or a portion of a region of the gNA variant; or any combination of the foregoing. In some cases, the modification is a substitution of 1 to 15 consecutive or non-consecutive nucleotides in the gNA variant in one or more regions. In other cases, the modification is a deletion of 1 to 10 consecutive or non-consecutive nucleotides in the gNA variant in one or more regions. In other cases, the modification is an insertion of 1 to 10 consecutive or non-consecutive nucleotides in the gNA variant in one or more regions. In other cases, the modification is a substitution of the scaffold stem loop or the extended stem loop with an RNA stem loop sequence from a heterologous RNA source with proximal 5′ and 3′ ends. In some embodiments, the gNA variant comprises an extended stem loop region comprising at least 10, at least 100, at least 500, at least 1000, or at least 10,000 nucleotides. In some embodiments, the heterologous stem loop increases the stability of the gNA. In some embodiments, the heterologous RNA stem loop is capable of binding a protein, an RNA structure, a DNA sequence, or a small molecule. In some embodiments, an exogenous stem loop region comprises an RNA stem loop or hairpin, for example a thermostable RNA such as MS2 (ACAUGAGGAUUACCCAUGU; SEQ ID NO: 354), Qβ (UGCAUGUCUAAGACAGCA; SEQ ID NO: 355), U1 hairpin II (AAUCCAUUGCACUCCGGAUU; SEQ ID NO: 356), Uvsx (CCUCUUCGGAGG; SEQ ID NO: 357), PP7 (AGGAGUUUCUAUGGAAACCCU; SEQ ID NO: 358), Phage replication loop (AGGUGGGACGACCUCUCGGUCGUCCUAUCU; SEQ ID NO: 359), Kissing loop_a (UGCUCGCUCCGUUCGAGCA; SEQ ID NO: 360), Kissing loop_b1 (UGCUCGACGCGUCCUCGAGCA; SEQ ID NO: 361), Kissing loop_b2 (UGCUCGUUUGCGGCUACGAGCA; SEQ ID NO: 362), G quadriplex M3q (AGGGAGGGAGGGAGAGG; SEQ ID NO: 363), G quadriplex telomere basket (GGUUAGGGUUAGGGUUAGG; SEQ ID NO: 364), Sarcin-ricin loop (CUGCUCAGUACGAGAGGAACCGCAG; SEQ ID NO: 365) or Pseudoknots (UACACUGGGAUCGCUGAAUUAGAGAUCGGCGUCCUUUCAUUCUAUAUACUUUGG AGUUUUAAAAUGUCUCUAAGUACA; SEQ ID NO: 366). In some embodiments, an exogenous stem loop comprises a long non-coding RNA (lncRNA). As used herein, a lncRNA refers to a non-coding RNA that is longer than approximately 200 bp in length. In some embodiments, the 5′ and 3′ ends of the exogenous stem loop are base paired, i.e., interact to form a region of duplex RNA. In some embodiments, the 5′ and 3′ ends of the exogenous stem loop are base paired, and one or more regions between the 5′ and 3′ ends of the exogenous stem loop are not base paired.

[0282] In some cases, a gNA variant of the disclosure comprises two or more modifications in one region. In other cases, a gNA variant of the disclosure comprises modifications in two or more regions. In other cases, a gNA variant comprises any combination of the foregoing modifications described in this paragraph. In some embodiments, exemplary modifications of gNA of the disclosure include the modifications of Table 3.

[0283] In some embodiments, a 5′ G is added to a gNA variant sequence for expression in vivo, as transcription from a U6 promoter is more efficient and more consistent with regard to the start site when the +1 nucleotide is a G. In other embodiments, two 5′ Gs are added to a gNA variant sequence for in vitro transcription to increase production efficiency, as T7 polymerase strongly prefers a G in the +1 position and a purine in the +2 position. In some cases, the 5′ G bases are added to the reference scaffolds of Table 2. In other cases, the 5′ G bases are added to the variant scaffolds of Table 3.

[0284] Table 3 provides exemplary gNA variant scaffold sequences of the disclosure created by the methods of the disclosure. In Table 3, (−) indicates a deletion at the specified position(s) relative to the reference sequence of SEQ ID NO: 5, (+) indicates an insertion of the specified base(s) at the position indicated relative to SEQ ID NO: 5, (:) indicates the range of bases at the specified start:stop coordinates of a deletion or substitution relative to SEQ ID NO: 5, and multiple insertions, deletions or substitutions are separated by commas; e.g., A14C, T17G. In some embodiments, the gNA variant scaffold comprises any one of the sequences listed in Table 3, or SEQ ID NOS: 2101-2280, or a sequence having at least about 50%, at least about 60%, at least about 70%, at least about 80%, at least about 90%, at least about 95%, at least about 95%, at least about 96%, at least about 97%, at least about 98%, at least about 99% sequence identity thereto. In some embodiments, the gNA variant comprises one or more additional changes to a sequence of any one of SEQ ID NOs: 2201-2280. In some embodiments, the gNA variant comprises the sequence of any one of SEQ ID NOS: 2236, 2237, 2238, 2241, 2244, 2248, 2249, or 2259-2280, or having at least about 80%, at least about 90%, at least about 95%, at least about 96%, at least about 97%, at least about 98%, at least about 99% identity thereto. In some embodiments, the gNA variant comprises one or more additional changes to a sequence of any one of SEQ ID NOs: 2201-2280. In some embodiments of the gNA variants of the disclosure, the gNA variant comprises at least one modification, wherein the at least one modification compared to the reference guide scaffold of SEQ ID NO: 5 is selected from one or more of: (a) a C18G substitution in the triplex loop; (b) a G55 insertion in the stem bubble; (c) a U1 deletion; (d) a modification of the extended stem loop wherein (i) a 6 nt loop and 13 loop-proximal base pairs are replaced by a Uvsx hairpin; and (ii) a deletion of A99 and a substitution of G65U that results in a loop-distal base that is fully base-paired. In some embodiments, the gNA variant comprises the sequence of any one of SEQ ID NOS: 2236, 2237, 2238, 2241, 2244, 2248, 2249, or 2259-2280. It will be understood that in those embodiments wherein a vector comprises a DNA encoding sequence for a gNA, or where a gNA is a gDNA or a chimera of RNA and DNA, that thymine (T) bases can be substituted for the uracil (U) bases of any of the gNA sequence embodiments described herein.

TABLE 3
Exemplary gNA Variant Scaffold Sequences

| SEQ | | |
|---|---|---|
| ID | NAME or | |
| NO: | Modification | NUCLEOTIDE SEQUENCE |
| 2101 | phage | UACUGGCGCUUUUAUCUCAUUACUUUGAGAGCCAUCACCAGCGACUA |
| | replication | UGUCGUAUGGGUAAAGCGCAGGUGGGACGACCUCUCGGUCGUCCUAU |
| | stable | CUGAAGCAUCAAAG |
| 2102 | Kissing | UACUGGCGCUUUUAUCUCAUUACUUUGAGAGCCAUCACCAGCGACUA |
| | loop_b1 | UGUCGUAUGGGUAAAGCGCUGCUCGACGCGUCCUCGAGCAGAAGCAU |
| | | CAAAG |
| 2103 | Kissing | UACUGGCGCUUUUAUCUCAUUACUUUGAGAGCCAUCACCAGCGACUA |
| | loop_a | UGUCGUAUGGGUAAAGCGCUGCUCGCUCCGUUCGAGCAGAAGCAUCA |
| | | AAG |
| 2104 | 32, uvsX | GUACUGGCGCUUUUAUCUCAUUACUUUGAGAGCCAUCACCAGCGACU |
| | hairpin | AUGUCGUAUGGGUAAAGCGCCCUCUUCGGAGGGAAGCAUCAAAG |
| 2105 | PP7 | UACUGGCGCUUUUAUCUCAUUACUUUGAGAGCCAUCACCAGCGACUA |
| | | UGUCGUAUGGGUAAAGCGCAGGAGUUUCUAUGGAAACCCUGAAGCAU |
| | | CAAAG |
| 2106 | 64, trip mut, | GUACUGGCGCCUUUAUCUCAUUACUUUGAGAGCCAUCACCAGCGACU |
| | extended stem | AUGUCGUAUGGGUAAAGCGCUUACGGACUUCGGUCCGUAAGAAGCAU |
| | truncation | CAAAG |
| 2107 | hyperstable | UACUGGCGCUUUUAUCUCAUUACUUUGAGAGCCAUCACCAGCGACUA |
| | tetraloop | UGUCGUAUGGGUAAAGCGCUGCGCUUGCGCAGAAGCAUCAAAG |
| 2108 | C18G | UACUGGCGCUUUUAUCUGAUUACUUUGAGAGCCAUCACCAGCGACUA |
| | | UGUCGUAUGGGUAAAGCGCUUAUUUAUCGGAGAGAAAUCCGAUAAAU |
| | | AAGAAGCAUCAAAG |
| 2109 | T17G | UACUGGCGCUUUUAUCGCAUUACUUUGAGAGCCAUCACCAGCGACUA |
| | | UGUCGUAUGGGUAAAGCGCUUAUUUAUCGGAGAGAAAUCCGAUAAAU |
| | | AAGAAGCAUCAAAG |
| 2110 | CUUCGG | UACUGGCGCUUUUAUCUCAUUACUUUGAGAGCCAUCACCAGCGACUA |
| | loop | UGUCGUAUGGGUAAAGCGCUUAUUUAUCGGAGACUUCGGUCCGAUAA |
| | | AUAAGAAGCAUCAAAG |
| 2111 | MS2 | UACUGGCGCUUUUAUCUCAUUACUUUGAGAGCCAUCACCAGCGACUA |
| | | UGUCGUAUGGGUAAAGCGCACAUGAGGAUUACCCAUGUGAAGCAUCA |
| | | AAG |
| 2112 | -1, A2G, -78, | GCUGGCGCUUUUAUCUCAUUACUUUGAGAGCCAUCACCAGCGACUAU |
| | G77T | GUCGUAUGGGUAAAGCGCUUAUUUAUCGUGAGAAAUCCGAUAAAUAA |
| | | GAAGCAUCAAAG |
| 2113 | QB | UACUGGCGCUUUUAUCUCAUUACUUUGAGAGCCAUCACCAGCGACUA |
| | | UGUCGUAUGGGUAAAGCGCUGCAUGUCUAAGACAGCAGAAGCAUCAA |
| | | AG |
| 2114 | 45, 44 hairpin | UACUGGCGCUUUUAUCUCAUUACUUUGAGAGCCAUCACCAGCGACUA |
| | | UGUCGUAUGGGUAAAGCGCAGGGCUUCGGCCGAAGCAUCAAAG |
| 2115 | U1A | UACUGGCGCUUUUAUCUCAUUACUUUGAGAGCCAUCACCAGCGACUA |
| | | UGUCGUAUGGGUAAAGCGCAAUCCAUUGCACUCCGGAUUGAAGCAUC |
| | | AAAG |
| 2116 | A14C, T17G | UACUGGCGCUUUUCUCGCAUUACUUUGAGAGCCAUCACCAGCGACUA |
| | | UGUCGUAUGGGUAAAGCGCUUAUUUAUCGGAGAGAAAUCCGAUAAAU |
| | | AAGAAGCAUCAAAG |
| 2117 | CUUCGG | UACUGGCGCUUUUAUCUCAUUACUUUGAGAGCCAUCACCAGCGACUA |
| | loop modified | UGUCGUAUGGGUAAAGCGCUUAUUUAUCGGACUUCGGUCCGAUAAAU |
| | | AAGAAGCAUCAAAG |
| 2118 | Kissing | UACUGGCGCUUUUAUCUCAUUACUUUGAGAGCCAUCACCAGCGACUA |
| | loop_b2 | UGUCGUAUGGGUAAAGCGCUGCUCGUUUGCGGCUACGAGCAGAAGCA |
| | | UCAAAG |
| 2119 | -76:78, -83:87 | UACUGGCGCUUUUAUCUCAUUACUUUGAGAGCCAUCACCAGCGACUA |
| | | UGUCGUAUGGGUAAAGCGCUUAUUUAUCGAGAGAUAAAUAAGAAGCA |
| | | UCAAAG |
| 2120 | -4 | UACGGCGCUUUUAUCUCAUUACUUUGAGAGCCAUCACCAGCGACUAU |
| | | GUCGUAUGGGUAAAGCGCUUAUUUAUCGGAGAGAAAUCCGAUAAAUA |
| | | AGAAGCAUCAAAG |
| 2121 | extended stem | UACUGGCGCCUUUUAUCUCAUUACUUUGAGAGCCAUCACCAGCGACU |
| | truncation | AUGUCGUAUGGGUAAAGCGCUUACGGACUUCGGUCCGUAAGAAGCAU |
| | | CAAAG |
| 2122 | C55 | UACUGGCGCUUUUAUCUCAUUACUUUGAGAGCCAUCACCAGCGACUA |
| | | UGUCGUAUCGGUAAAGCGCUUAUUUAUCGGAGAGAAAUCCGAUAAAU |
| | | AAGAAGCAUCAAAG |
| 2123 | trip mut | UACUGGCGCCUUUAUCUCAUUACUUUGAGAGCCAUCACCAGCGACUA |
| | | UGUCGUAUGGGUAAAGCGCUUAUUUAUCGGACUUCGGUCCGAUAAAU |
| | | AAGAAGCAUCAAAG |
| 2124 | -76:78 | UACUGGCGCUUUUAUCUCAUUACUUUGAGAGCCAUCACCAGCGACUA |
| | | UGUCGUAUGGGUAAAGCGCUUAUUUAUCGAGAAAUCCGAUAAAUAAG |
| | | AAGCAUCAAAG |
| 2125 | -1:5 | GCGCUUUUAUCUCAUUACUUUGAGAGCCAUCACCAGCGACUAUGUCG |
| | | UAUGGGUAAAGCGCUUAUUUAUCGGAGAGAAAUCCGAUAAAUAAGAA |
| | | GCAUCAAAG |
| 2126 | -83:87 | UACUGGCGCUUUUAUCUCAUUACUUUGAGAGCCAUCACCAGCGACUA |
| | | UGUCGUAUGGGUAAAGCGCUUAUUUAUCGGAGAGAGAUAAAUAAGAA |
| | | GCAUCAAAG |
| 2127 | =+G28, A82T, | UACUGGCGCUUUUAUCUCAUUACUUUGGAGAGCCAUCACCAGCGACU |
| | -84, | AUGUCGUAUGGGUAAAGCGCUUAUUUAUCGGAGAGUAUCCGAUAAAU |
| | | AAGAAGCAUCAAAG |
| 2128 | =+51T | UACUGGCGCUUUUAUCUCAUUACUUUGAGAGCCAUCACCAGCGACUA |
| | | UGUUCGUAUGGGUAAAGCGCUUAUUUAUCGGAGAGAAAUCCGAUAAA |
| | | UAAGAAGCAUCAAAG |
| 2129 | -1:4, +G5A, | AGCGCUUUUAUCUCAUUACUUUGAGAGCCAUCACCAGCGACUAUGUC |
| | +G86, | GUAUGGGUAAAGCGCUUAUUUAUCGGAGAGAAAUGCCGAUAAAUAAG |
| | | AAGCAUCAAAG |
| 2130 | =+A94 | UACUGGCGCUUUUAUCUCAUUACUUUGAGAGCCAUCACCAGCGACUA |
| | | UGUCGUAUGGGUAAAGCGCUUAUUUAUCGGAGAGAAAUCCGAUAAAA |
| | | UAAGAAGCAUCAAAG |
| 2131 | =+G72 | UACUGGCGCUUUUAUCUCAUUACUUUGAGAGCCAUCACCAGCGACUA |
| | | UGUCGUAUGGGUAAAGCGCUUAUUGUAUCGGAGAGAAAUCCGAUAAA |
| | | UAAGAAGCAUCAAAG |
| 2132 | shorten front, | GCGCUUUUAUCUCAUUACUUUGAGAGCCAUCACCAGCGACUAUGUCG |
| | CUUCGG | UAUGGGUAAAGCGCUUAUUUAUCGGACUUCGGUCCGAUAAAUAAGCG |
| | loop modified. | CAUCAAAG |
| | extend | |
| | extended | |
| 2133 | A14C | UACUGGCGCUUUUCUCUCAUUACUUUGAGAGCCAUCACCAGCGACUA |
| | | UGUCGUAUGGGUAAAGCGCUUAUUUAUCGGAGAGAAAUCCGAUAAAU |
| | | AAGAAGCAUCAAAG |
| 2134 | -1:3, +G3 | GUGGCGCUUUUAUCUCAUUACUUUGAGAGCCAUCACCAGCGACUAUG |
| | | UCGUAUGGGUAAAGCGCUUAUUUAUCGGAGAGAAAUCCGAUAAAUAA |
| | | GAAGCAUCAAAG |
| 2135 | =+C45, +T46 | UACUGGCGCUUUUAUCUCAUUACUUUGAGAGCCAUCACCAGCGACCU |
| | | UAUGUCGUAUGGGUAAAGCGCUUAUUUAUCGGAGAGAAAUCCGAUAA |
| | | AUAAGAAGCAUCAAAG |
| 2136 | CUUCGG | GAUGGCGCUUUUAUCUCAUUACUUUGAGAGCCAUCACCAGCGACUAU |
| | loop modified, | GUCGUAUGGGUAAAGCGCUUAUUUAUCGGACUUCGGUCCGAUAAAUA |
| | fun start | AGAAGCAUCAAAG |
| 2137 | -93:94 | UACUGGCGCUUUUAUCUCAUUACUUUGAGAGCCAUCACCAGCGACUA |
| | | UGUCGUAUGGGUAAAGCGCUUAUUUAUCGGAGAGAAAUCCGAUAAAA |
| | | GAAGCAUCAAAG |
| 2138 | =+T45 | UACUGGCGCUUUUAUCUCAUUACUUUGAGAGCCAUCACCAGCGAUCU |
| | | AUGUCGUAUGGGUAAAGCGCUUAUUUAUCGGAGAGAAAUCCGAUAAA |
| | | UAAGAAGCAUCAAAG |
| 2139 | -69, -94 | UACUGGCGCUUUUAUCUCAUUACUUUGAGAGCCAUCACCAGCGACUA |
| | | UGUCGUAUGGGUAAAGGCUUAUUUAUCGGAGAGAAAUCCGAUAAAAA |
| | | GAAGCAUCAAAG |
| 2140 | -94 | UACUGGCGCUUUUAUCUCAUUACUUUGAGAGCCAUCACCAGCGACUA |
| | | UGUCGUAUGGGUAAAGCGCUUAUUUAUCGGAGAGAAAUCCGAUAAAA |
| | | AGAAGCAUCAAAG |
| 2141 | modified | UACUGGCGCUUUAUCUCAUUACUUUGAGAGCCAUCACCAGCGACUAU |
| | CUUCGG, | GUCGUAUGGGUAAAGCGCUUAUUUAUCGGACUUCGGUCCGAUAAAUA |
| | minus T in 1st | AGAAGCAUCAAAG |
| | triplex | |
| 2142 | -1:4, +C4, | CGGCGCUUUUCUCGCAUUACUUUGAGAGCCAUCACCAGCGACUAUGU |
| | A14C, T17G, | CGUAUGGGUAAAGCGCUUAUUGUAUCGAGAGAUAAAUAAGAAGCAUC |
| | +G72, -76:78, | AAAG |
| | -83:87 | |
| 2143 | T1C, -73 | CACUGGCGCUUUUAUCUCAUUACUUUGAGAGCCAUCACCAGCGACUA |
| | | UGUCGUAUGGGUAAAGCGCUUAUUUUCGGAGAGAAAUCCGAUAAAUA |
| | | AGAAGCAUCAAAG |
| 2144 | Scaffold | UACUGGCGCUUUAUCUCAUUACUUUGAGAGCCAUCACCAGCGACUUC |
| | uuCG, stem | GGUCGUAUGGGUAAAGCGCUUAUGUAUCGGCUUCGGCCGAUACAUAA |
| | uuCG. Stem | GAAGCAUCAAAG |
| | swap, t | |
| | shorten | |
| 2145 | Scaffold | UACUGGCGCUUUUAUCUCAUUACUUUGAGAGCCAUCACCAGCGACUU |
| | uuCG, stem | CGGUCGUAUGGGUAAAGCGCUUAUGUAUCGGCUUCGGCCGAUACAUA |
| | uuCG. Stem | AGAAGCAUCAAAG |
| | swap | |
| 2146 | =+G60 | UACUGGCGCUUUUAUCUCAUUACUUUGAGAGCCAUCACCAGCGACUA |
| | | UGUCGUAUGGGUGAAAGCGCUUAUUUAUCGGAGAGAAAUCCGAUAAA |
| | | UAAGAAGCAUCAAAG |
| 2147 | no stem | UACUGGCGCUUUUAUCUCAUUACUUUGAGAGCCAUCACCAGCGACUU |
| | Scaffold | CGGUCGUAUGGGUAAAG |
| | uuCG | |
| 2148 | no stem | GAUGGGCUUUUAUCUCAUUACUUUGAGAGCCAUCACCAGCGACUUCG |
| | Scaffold | GUCGUAUGGGUAAAG |
| | uuCG, fun | |
| | start | |
| 2149 | Scaffold | GAUGGGCUUUUAUCUCAUUACUUUGAGAGCCAUCACCAGCGACUUCG |
| | uuCG, stem | GUCGUAUGGGUAAAGCGCUUAUUUAUCGGCUUCGGCCGAUAAAUAAG |
| | uuCG, fun | AAGCAUCAAAG |
| | start | |
| 2150 | Pseudoknots | UACUGGCGCUUUUAUCUCAUUACUUUGAGAGCCAUCACCAGCGACUA |
| | | UGUCGUAUGGGUAAAGCGCUACACUGGGAUCGCUGAAUUAGAGAUCG |
| | | GCGUCCUUUCAUUCUAUAUACUUUGGAGUUUUAAAAUGUCUCUAAGU |
| | | ACAGAAGCAUCAAAG |
| 2151 | Scaffold | GGCGCUUUUAUCUCAUUACUUUGAGAGCCAUCACCAGCGACUUCGGU |
| | uuCG, stem | CGUAUGGGUAAAGCGCUUAUUUAUCGGCUUCGGCCGAUAAAUAAGAA |
| | uuCG | GCAUCAAAG |
| 2152 | Scaffold | GCUGGCGCUUUUAUCUCAUUACUUUGAGAGCCAUCACCAGCGACUUC |
| | uuCG, stem | GGUCGUAUGGGUAAAGCGCUUAUUUAUCGGCUUCGGCCGAUAAAUAA |
| | uuCG, no start | GAAGCAUCAAAG |
| 2153 | Scaffold | UACUGGCGCUUUUAUCUCAUUACUUUGAGAGCCAUCACCAGCGACUU |
| | uuCG | CGGUCGUAUGGGUAAAGCGCUUAUUUAUCGGAGAGAAAUCCGAUAAA |
| | | UAAGAAGCAUCAAAG |
| 2154 | =+GCTC36 | UACUGGCGCUUUUAUCUCAUUACUUUGAGAGCCAUGCUCCACCAGCG |
| | | ACUAUGUCGUAUGGGUAAAGCGCUUAUUUAUCGGAGAGAAAUCCGAU |
| | | AAAUAAGAAGCAUCAAAG |
| 2155 | G quadriplex | UACUGGCGCUUUUAUCUCAUUACUUUGAGAGCCAUCACCAGCGACUA |
| | telomere | UGUCGUAUGGGUAAAGCGGGGUUAGGGUUAGGGUUAGGGAAGCAUCA |
| | basket+ ends | AAG |
| 2156 | G quadriplex | UACUGGCGCUUUUAUCUCAUUACUUUGAGAGCCAUCACCAGCGACUA |
| | M3q | UGUCGUAUGGGUAAAGCGGAGGGAGGGAGGGAGAGGGAAAGCAUCAA |
| | | AG |
| 2157 | G quadriplex | UACUGGCGCUUUUAUCUCAUUACUUUGAGAGCCAUCACCAGCGACUA |
| | telomere | UGUCGUAUGGGUAAAGCGUUGGGUUAGGGUUAGGGUUAGGGAAAAGC |
| | basket no ends | AUCAAAG |
| 2158 | 45, 44 hairpin | UACUGGCGCUUUUAUCUCAUUACUUUGAGAGCCAUCACCAGCGACUA |
| | (old version) | UGUCGUAUGGGUAAAGCGC--------AGGGCUUCGGCCG------- |
| | | --GAAGCAUCAAAG |
| 2159 | Sarcin-ricin | UACUGGCGCUUUUAUCUCAUUACUUUGAGAGCCAUCACCAGCGACUA |
| | loop | UGUCGUAUGGGUAAAGCGCCUGCUCAGUACGAGAGGAACCGCAGGAA |
| | | GCAUCAAAG |
| 2160 | uvsX, C18G | UACUGGCGCUUUUAUCUGAUUACUUUGAGAGCCAUCACCAGCGACUA |
| | | UGUCGUAUGGGUAAAGCGCCCUCUUCGGAGGGAAGCAUCAAAG |
| 2161 | truncated stem | UACUGGCGCCUUUAUCUGAUUACUUUGAGAGCCAUCACCAGCGACUA |
| | loop, C18G, | UGUCGUAUGGGUAAAGCGCUUACGGACUUCGGUCCGUAAGAAGCAUC |
| | trip mut | AAAG |
| | (T10C) | |
| 2162 | short phage | UACUGGCGCUUUUAUCUGAUUACUUUGAGAGCCAUCACCAGCGACUA |
| | rep, C18G | UGUCGUAUGGGUAAAGCGCGGACGACCUCUCGGUCGUCCGAAGCAUC |
| | | AAAG |
| 2163 | phage rep | UACUGGCGCUUUUAUCUGAUUACUUUGAGAGCCAUCACCAGCGACUA |
| | loop, C18G | UGUCGUAUGGGUAAAGCGCAGGUGGGACGACCUCUCGGUCGUCCUAU |
| | | CUGAAGCAUCAAAG |
| 2164 | =+G18, | UACUGGCGCCUUUAUCUGCAUUACUUUGAGAGCCAUCACCAGCGACU |
| | stacked onto | AUGUCGUAUGGGUAAAGCGCUUACGGACUUCGGUCCGUAAGAAGCAU |
| | 64 | CAAAG |
| 2165 | truncated stem | GCUGGCGCUUUUAUCUGAUUACUUUGAGAGCCAUCACCAGCGACUAU |
| | loop, C18G, -1 | GUCGUAUGGGUAAAGCGCUUACGGACUUCGGUCCGUAAGAAGCAUCA |
| | A2G | AAG |
| 2166 | phage rep | UACUGGCGCCUUUAUCUGAUUACUUUGAGAGCCAUCACCAGCGACUA |
| | lpop, C18G, | UGUCGUAUGGGUAAAGCGCAGGUGGGACGACCUCUCGGUCGUCCUAU |
| | trip mut | CUGAAGCAUCAAAG |
| | (T10C) | |
| 2167 | short phage | UACUGGCGCCUUUAUCUGAUUACUUUGAGAGCCAUCACCAGCGACUA |
| | rep, C18G, | UGUCGUAUGGGUAAAGCGCGGACGACCUCUCGGUCGUCCGAAGCAUC |
| | trip mut | AAAG |
| | (T10C) | |
| 2168 | uvsX, trip mut | UACUGGCGCCUUUAUCUCAUUACUUUGAGAGCCAUCACCAGCGACUA |
| | (T10C) | UGUCGUAUGGGUAAAGCGCCCUCUUCGGAGGGAAGCAUCAAAG |
| 2169 | truncated stem | UACUGGCGCUUUUAUCUCAUUACUUUGAGAGCCAUCACCAGCGACUA |
| | loop | UGUCGUAUGGGUAAAGCGCUUACGGACUUCGGUCCGUAAGAAGCAUC |
| | | AAAG |
| 2170 | =+A17, | UACUGGCGCCUUUAUCAUCAUUACUUUGAGAGCCAUCACCAGCGACU |
| | stacked onto | AUGUCGUAUGGGUAAAGCGCUUACGGACUUCGGUCCGUAAGAAGCAU |
| | 64 | CAAAG |
| 2171 | 3′ HDV | UACUGGCGCUUUUAUCUCAUUACUUUGAGAGCCAUCACCAGCGACUA |
| | genomic | UGUCGUAUGGGUAAAGCGCUUAUUUAUCGGAGAGAAAUCCGAUAAAU |
| | ribozyme | AAGAAGCAUCAAAGGGCCGGCAUGGUCCCAGCCUCCUCGCUGGCGCC |
| | | GGCUGGGCAACAUUCCGAGGGGACCGUCCCCUCGGUAAUGGCGAAUG |
| | | GGACCC |
| 2172 | phage rep | UACUGGCGCCUUUAUCUCAUUACUUUGAGAGCCAUCACCAGCGACUA |
| | loop, trip mut | UGUCGUAUGGGUAAAGCGCAGGUGGGACGACCUCUCGGUCGUCCUAU |
| | (T10C) | CUGAAGCAUCAAAG |
| 2173 | -79:80 | UACUGGCGCUUUUAUCUCAUUACUUUGAGAGCCAUCACCAGCGACUA |
| | | UGUCGUAUGGGUAAAGCGCUUAUUUAUCGGAGAAAUCCGAUAAAUAA |
| | | GAAGCAUCAAAG |
| 2174 | short phage | UACUGGCGCCUUUAUCUCAUUACUUUGAGAGCCAUCACCAGCGACUA |
| | rep, trip mut | UGUCGUAUGGGUAAAGCGCGGACGACCUCUCGGUCGUCCGAAGCAUC |
| | (T10C) | AAAG |
| 2175 | extra | UACUGGCGCUUUUAUCUCAUUACUUUGAGAGCCAUCACCAGCGACUA |
| | truncated stem | UGUCGUAUGGGUAAAGCGCCGGACUUCGGUCCGGAAGCAUCAAAG |
| | loop | |
| 2176 | T17G, C18G | UACUGGCGCUUUUAUCGGAUUACUUUGAGAGCCAUCACCAGCGACUA |
| | | UGUCGUAUGGGUAAAGCGCUUAUUUAUCGGAGAGAAAUCCGAUAAAU |
| | | AAGAAGCAUCAAAG |
| 2177 | short phage | UACUGGCGCUUUUAUCUCAUUACUUUGAGAGCCAUCACCAGCGACUA |
| | rep | UGUCGUAUGGGUAAAGCGCGGACGACCUCUCGGUCGUCCGAAGCAUC |
| | | AAAG |
| 2178 | uvsX, C18G, -1 | GCUGGCGCUUUUAUCUGAUUACUUUGAGAGCCAUCACCAGCGACUAU |
| | A2G | GUCGUAUGGGUAAAGCGCCCUCUUCGGAGGGAAGCAUCAAAG |
| 2179 | uvsX, C18G, | GCUGGCGCCUUUAUCUGAUUACUUUGAGAGCCAUCACCAGCGACUAU |
| | trip mut | GUCGUAUGGGUAAAGCUCCCUCUUCGGAGGGAGCAUCAAAG |
| | (T10C), -1 | |
| | A2G, HDV | |
| | -99 G65U | |
| 2180 | 3′ HDV | UACUGGCGCUUUUAUCUCAUUACUUUGAGAGCCAUCACCAGCGACUA |
| | antigenomic | UGUCGUAUGGGUAAAGCGCUUAUUUAUCGGAGAGAAAUCCGAUAAAU |
| | ribozyme | AAGAAGCAUCAAAGGGGUCGGCAUGGCAUCUCCACCUCCUCGCGGUC |
| | | CGACCUGGGCAUCCGAAGGAGGACGCACGUCCACUCGGAUGGCUAAG |
| | | GGAGAGCCA |
| 2181 | uvsX, C18G, | GCUGGCGCCUUUAUCUGAUUACUUUGAGAGCCAUCACCAGCGACUAU |
| | trip mut | GUCGUAUGGGUAAAGCGCCCUCUUCGGAGGGCGCAUCAAAG |
| | (T10C), -1 | |
| | A2G, HDV | |
| | AA(98:99)C | |
| 2182 | 3′ HDV | UACUGGCGCUUUUAUCUCAUUACUUUGAGAGCCAUCACCAGCGACUA |
| | ribozyme | UGUCGUAUGGGUAAAGCGCUUAUUUAUCGGAGAGAAAUCCGAUAAAU |
| | (Lior Nissim, | AAGAAGCAUCAAAGUUUUGGCCGGCAUGGUCCCAGCCUCCUCGCUGG |
| | Timothy Lu) | CGCCGGCUGGGCAACAUGCUUCGGCAUGGCGAAUGGGACCCCGGG |
| 2183 | TAC(1:3)GA, | GAUGGCGCCUUUAUCUCAUUACUUUGAGAGCCAUCACCAGCGACUAU |
| | stacked onto | GUCGUAUGGGUAAAGCGCUUACGGACUUCGGUCCGUAAGAAGCAUCA |
| | 64 | AAG |
| 2184 | uvsX, -1 A2G | GCUGGCGCUUUUAUCUCAUUACUUUGAGAGCCAUCACCAGCGACUAU |
| | | GUCGUAUGGGUAAAGCGCCCUCUUCGGAGGGAAGCAUCAAAG |
| 2185 | truncated stem | GCUGGCGCCUUUAUCUGAUUACUUUGAGAGCCAUCACCAGCGACUAU |
| | loop, C18G, | GUCGUAUGGGUAAAGCUCUUACGGACUUCGGUCCGUAAGAGCAUCAA |
| | trip mut | AG |
| | (T10C), -1 | |
| | A2G, HDV | |
| | -99 G65U | |
| 2186 | short phage | GCUGGCGCCUUUAUCUGAUUACUUUGAGAGCCAUCACCAGCGACUAU |
| | rep, C18G, | GUCGUAUGGGUAAAGCUCGGACGACCUCUCGGUCGUCCGAGCAUCAA |
| | trip mut | AG |
| | (T10C), -1 | |
| | A2G, HDV | |
| | -99 G65U | |
| 2187 | 3′ sTRSV WT | UACUGGCGCUUUUAUCUCAUUACUUUGAGAGCCAUCACCAGCGACUA |
| | viral | UGUCGUAUGGGUAAAGCGCUUAUUUAUCGGAGAGAAAUCCGAUAAAU |
| | Hammerhead | AAGAAGCAUCAAAGCCUGUCACCGGAUGUGCUUUCCGGUCUGAUGAG |
| | ribozyme | UCCGUGAGGACGAAACAGG |
| 2188 | short phage | GCUGGCGCUUUUAUCUGAUUACUUUGAGAGCCAUCACCAGCGACUAU |
| | rep, C18G, -1 | GUCGUAUGGGUAAAGCGCGGACGACCUCUCGGUCGUCCGAAGCAUCA |
| | A2G | AAG |
| 2189 | short phage | GCUGGCGCCUUUAUCUGAUUACUUUGAGAGCCAUCACCAGCGACUAU |
| | rep, C18G, | GUCGUAUGGGUAAAGCGCGGACGACCUCUCGGUCGUCCGAAGCAUCA |
| | trip mut | AAG |
| | (T10C), -1 | |
| | A2G, 3′ | |
| | genomic HDV | |
| 2190 | phage rep | GCUGGCGCCUUUAUCUGAUUACUUUGAGAGCCAUCACCAGCGACUAU |
| | loop, C18G, | GUCGUAUGGGUAAAGCUCAGGUGGGACGACCUCUCGGUCGUCCUAUC |
| | trip mut | UGAGCAUCAAAG |
| | (T10C), -1 | |
| | A2G, HDV | |
| | -99 G65U | |
| 2191 | 3′ HDV | UACUGGCGCUUUUAUCUCAUUACUUUGAGAGCCAUCACCAGCGACUA |
| | ribozyme | UGUCGUAUGGGUAAAGCGCUUAUUUAUCGGAGAGAAAUCCGAUAAAU |
| | (Owen Ryan, | AAGAAGCAUCAAAGGAUGGCCGGCAUGGUCCCAGCCUCCUCGCUGGC |
| | Jamie Cate) | GCCGGCUGGGCAACACCUUCGGGUGGCGAAUGGGAC |
| 2192 | phage rep | GCUGGCGCUUUUAUCUGAUUACUUUGAGAGCCAUCACCAGCGACUAU |
| | loop, C18G, -1 | GUCGUAUGGGUAAAGCGCAGGUGGGACGACCUCUCGGUCGUCCUAUC |
| | A2G | UGAAGCAUCAAAG |
| 2193 | 0.14 | UACUGGCGCUUUUAUCUCAUUACUUUGAGAGCCAUCACCAGCGACUA |
| | | UGUCGUACUGGGUAAAGCGCUUAUUUAUCGGAGAGAAAUCCGAUAAA |
| | | UAAGAAGCAUCAAAG |
| 2194 | -78, G77T | UACUGGCGCUUUUAUCUCAUUACUUUGAGAGCCAUCACCAGCGACUA |
| | | UGUCGUAUGGGUAAAGCGCUUAUUUAUCGUGAGAAAUCCGAUAAAUA |
| | | AGAAGCAUCAAAG |
| 2195 | | GUACUGGCGCUUUUAUCUCAUUACUUUGAGAGCCAUCACCAGCGACU |
| | | AUGUCGUAUGGGUAAAGCGCUUAUUUAUCGGAGAGAAAUCCGAUAAA |
| | | UAAGAAGCAUCAAAG |
| 2196 | short phage | GCUGGCGCUUUUAUCUCAUUACUUUGAGAGCCAUCACCAGCGACUAU |
| | rep, -1 A2G | GUCGUAUGGGUAAAGCGCGGACGACCUCUCGGUCGUCCGAAGCAUCA |
| | | AAG |
| 2197 | truncated stem | GCUGGCGCCUUUAUCUGAUUACUUUGAGAGCCAUCACCAGCGACUAU |
| | loop, C18G, | GUCGUAUGGGUAAAGCGCUUACGGACUUCGGUCCGUAAGAAGCAUCA |
| | trip mut | AAG |
| | (T10C), -1 | |
| | A2G | |
| 2198 | -1, A2G | GCUGGCGCUUUUAUCUCAUUACUUUGAGAGCCAUCACCAGCGACUAU |
| | | GUCGUAUGGGUAAAGCGCUUAUUUAUCGGAGAGAAAUCCGAUAAAUA |
| | | AGAAGCAUCAAAG |
| 2199 | truncated stem | GCUGGCGCCUUUAUCUCAUUACUUUGAGAGCCAUCACCAGCGACUAU |
| | loop, trip mut | GUCGUAUGGGUAAAGCGCUUACGGACUUCGGUCCGUAAGAAGCAUCA |
| | (T10C), -1 | AAG |
| | A2G | |
| 2200 | uvsX, C18G, | GCUGGCGCCUUUAUCUGAUUACUUUGAGAGCCAUCACCAGCGACUAU |
| | trip mut | GUCGUAUGGGUAAAGCGCCCUCUUCGGAGGGAAGCAUCAAAG |
| | (T10C), -1 | |
| | A2G | |
| 2201 | phage rep | GCUGGCGCUUUUAUCUCAUUACUUUGAGAGCCAUCACCAGCGACUAU |
| | loop, -1 A2G | GUCGUAUGGGUAAAGCGCAGGUGGGACGACCUCUCGGUCGUCCUAUC |
| | | UGAAGCAUCAAAG |
| 2202 | phage rep | GCUGGCGCCUUUAUCUCAUUACUUUGAGAGCCAUCACCAGCGACUAU |
| | loop, trip mut | GUCGUAUGGGUAAAGCGCAGGUGGGACGACCUCUCGGUCGUCCUAUC |
| | (T10C), -1 | UGAAGCAUCAAAG |
| | A2G | |
| 2203 | phage rep | GCUGGCGCCUUUAUCUGAUUACUUUGAGAGCCAUCACCAGCGACUAU |
| | loop, C18G, | GUCGUAUGGGUAAAGCGCAGGUGGGACGACCUCUCGGUCGUCCUAUC |
| | trip mut | UGAAGCAUCAAAG |
| | (T10C), -1 | |
| | A2G | |
| 2204 | truncated stem | UACUGGCGCUUUUAUCUGAUUACUUUGAGAGCCAUCACCAGCGACUA |
| | loop, C18G | UGUCGUAUGGGUAAAGCGCUUACGGACUUCGGUCCGUAAGAAGCAUC |
| | | AAAG |
| 2205 | uvsX, trip mut | GCUGGCGCCUUUAUCUCAUUACUUUGAGAGCCAUCACCAGCGACUAU |
| | (T10C), -1 | GUCGUAUGGGUAAAGCGCCCUCUUCGGAGGGAAGCAUCAAAG |
| | A2G | |
| 2206 | truncated stem | GCUGGCGCUUUUAUCUCAUUACUUUGAGAGCCAUCACCAGCGACUAU |
| | loop, -1 A2G | GUCGUAUGGGUAAAGCGCUUACGGACUUCGGUCCGUAAGAAGCAUCA |
| | AAG | |
| 2207 | short phage | GCUGGCGCCUUUAUCUCAUUACUUUGAGAGCCAUCACCAGCGACUAU |
| | rep, trip mut | GUCGUAUGGGUAAAGCGCGGACGACCUCUCGGUCGUCCGAAGCAUCA |
| | (T10C), -1 | AAG |
| | A2G | |
| 2208 | 5′HDV | GAUGGCCGGCAUGGUCCCAGCCUCCUCGCUGGCGCCGGCUGGGCAAC |
| | ribozyme | ACCUUCGGGUGGCGAAUGGGACUACUGGCGCUUUUAUCUCAUUACUU |
| | (Owen Ryan, | UGAGAGCCAUCACCAGCGACUAUGUCGUAUGGGUAAAGCGCUUAUUU |
| | Jamie Cate) | AUCGGAGAGAAAUCCGAUAAAUAAGAAGCAUCAAAG |
| 2209 | 5′HDV | GGCCGGCAUGGUCCCAGCCUCCUCGCUGGCGCCGGCUGGGCAACAUU |
| | genomic | CCGAGGGGACCGUCCCCUCGGUAAUGGCGAAUGGGACCCUACUGGCG |
| | ribozyme | CUUUUAUCUCAUUACUUUGAGAGCCAUCACCAGCGACUAUGUCGUAU |
| | | GGGUAAAGCGCUUAUUUAUCGGAGAGAAAUCCGAUAAAUAAGAAGCA |
| | | UCAAAG |
| 2210 | truncated stem | GCUGGCGCCUUUAUCUGAUUACUUUGAGAGCCAUCACCAGCGACUAU |
| | loop, C18G, | GUCGUAUGGGUAAAGCGCUUACGGACUUCGGUCCGUAAGCGCAUCAA |
| | trip mut | AG |
| | (T10C), -1 | |
| | A2G, HDV | |
| | AA(98:99)C | |
| 2211 | 5′env25 pistol | CGUGGUUAGGGCCACGUUAAAUAGUUGCUUAAGCCCUAAGCGUUGAU |
| | ribozyme | CUUCGGAUCAGGUGCAAUACUGGCGCUUUUAUCUCAUUACUUUGAGA |
| | (with an added | GCCAUCACCAGCGACUAUGUCGUAUGGGUAAAGCGCUUAUUUAUCGG |
| | CUUCGG | AGAGAAAUCCGAUAAAUAAGAAGCAUCAAAG |
| | loop) | |
| 2212 | 5′HDV | GGGUCGGCAUGGCAUCUCCACCUCCUCGCGGUCCGACCUGGGCAUCC |
| | antigenomic | GAAGGAGGACGCACGUCCACUCGGAUGGCUAAGGGAGAGCCAUACUG |
| | ribozyme | GCGCUUUUAUCUCAUUACUUUGAGAGCCAUCACCAGCGACUAUGUCG |
| | | UAUGGGUAAAGCGCUUAUUUAUCGGAGAGAAAUCCGAUAAAUAAGAA |
| | | GCAUCAAAG |
| 2213 | 3′ | UACUGGCGCUUUUAUCUCAUUACUUUGAGAGCCAUCACCAGCGACUA |
| | Hammerhead | UGUCGUAUGGGUAAAGCGCUUAUUUAUCGGAGAGAAAUCCGAUAAAU |
| | ribozyme | AAGAAGCAUCAAAGCCAGUACUGAUGAGUCCGUGAGGACGAAACGAG |
| | (Lior Nissim, | UAAGCUCGUCUACUGGCGCUUUUAUCUCAU |
| | Timothy Lu) | |
| | guide scaffold | |
| | scar | |
| 2214 | =+A27, | UACUGGCGCCUUUAUCUCAUUACUUUAGAGAGCCAUCACCAGCGACU |
| | stacked onto | AUGUCGUAUGGGUAAAGCGCUUACGGACUUCGGUCCGUAAGAAGCAU |
| | 64 | CAAAG |
| 2215 | 5′Hammerhead | CGACUACUGAUGAGUCCGUGAGGACGAAACGAGUAAGCUCGUCUAGU |
| | ribozyme | CGUACUGGCGCUUUUAUCUCAUUACUUUGAGAGCCAUCACCAGCGAC |
| | (Lior Nissim, | UAUGUCGUAUGGGUAAAGCGCUUAUUUAUCGGAGAGAAAUCCGAUAA |
| | Timothy Lu) | AUAAGAAGCAUCAAAG |
| | smaller scar | |
| 2216 | phage rep | GCUGGCGCCUUUAUCUGAUUACUUUGAGAGCCAUCACCAGCGACUAU |
| | loop, C18G, | GUCGUAUGGGUAAAGCGCAGGUGGGACGACCUCUCGGUCGUCCUAUC |
| | trip mut | UGCGCAUCAAAG |
| | (T10C), -1 | |
| | A2G, HDV | |
| | AA(98:99)C | |
| 2217 | -27, stacked | UACUGGCGCCUUUAUCUCAUUACUUUAGAGCCAUCACCAGCGACUAU |
| | onto 64 | GUCGUAUGGGUAAAGCGCUUACGGACUUCGGUCCGUAAGAAGCAUCA |
| | | AAG |
| 2218 | 3′ Hatchet | UACUGGCGCUUUUAUCUCAUUACUUUGAGAGCCAUCACCAGCGACUA |
| | | UGUCGUAUGGGUAAAGCGCUUAUUUAUCGGAGAGAAAUCCGAUAAAU |
| | | AAGAAGCAUCAAAGCAUUCCUCAGAAAAUGACAAACCUGUGGGGCGU |
| | | AAGUAGAUCUUCGGAUCUAUGAUCGUGCAGACGUUAAAAUCAGGU |
| 2219 | 3 | UACUGGCGCUUUUAUCUCAUUACUUUGAGAGCCAUCACCAGCGACUA |
| | Hammerhead | UGUCGUAUGGGUAAAGCGCUUAUUUAUCGGAGAGAAAUCCGAUAAAU |
| | ribozyme | AAGAAGCAUCAAAGCGACUACUGAUGAGUCCGUGAGGACGAAACGAG |
| | (Lior Nissim, | UAAGCUCGUCUAGUCGCGUGUAGCGAAGCA |
| | Timothy Lu) | |
| 2220 | 5′Hatchet | CAUUCCUCAGAAAAUGACAAACCUGUGGGGCGUAAGUAGAUCUUCGG |
| | | AUCUAUGAUCGUGCAGACGUUAAAAUCAGGUUACUGGCGCUUUUAUC |
| | | UCAUUACUUUGAGAGCCAUCACCAGCGACUAUGUCGUAUGGGUAAAG |
| | | CGCUUAUUUAUCGGAGAGAAAUCCGAUAAAUAAGAAGCAUCAAAG |
| 2221 | 5′HDV | UUUUGGCCGGCAUGGUCCCAGCCUCCUCGCUGGCGCCGGCUGGGCAA |
| | ribozyme | CAUGCUUCGGCAUGGCGAAUGGGACCCCGGGUACUGGCGCUUUUAUC |
| | (Lior Nissim, | UCAUUACUUUGAGAGCCAUCACCAGCGACUAUGUCGUAUGGGUAAAG |
| | Timothy Lu) | CGCUUAUUUAUCGGAGAGAAAUCCGAUAAAUAAGAAGCAUCAAAG |
| 2222 | 5′Hammerhead | CGACUACUGAUGAGUCCGUGAGGACGAAACGAGUAAGCUCGUCUAGU |
| | ribozyme | CGCGUGUAGCGAAGCAUACUGGCGCUUUUAUCUCAUUACUUUGAGAG |
| | (Lior Nissim, | CCAUCACCAGCGACUAUGUCGUAUGGGUAAAGCGCUUAUUUAUCGGA |
| | Timothy Lu) | GAGAAAUCCGAUAAAUAAGAAGCAUCAAAG |
| 2223 | 3′ HH15 | UACUGGCGCUUUUAUCUCAUUACUUUGAGAGCCAUCACCAGCGACUA |
| | Minimal | UGUCGUAUGGGUAAAGCGCUUAUUUAUCGGAGAGAAAUCCGAUAAAU |
| | Hammerhead | AAGAAGCAUCAAAGGGGAGCCCCGCUGAUGAGGUCGGGGAGACCGAA |
| | ribozyme | AGGGACUUCGGUCCCUACGGGGCUCCC |
| 2224 | 5′ RBMX | CCACCCCCACCACCACCCCCACCCCCACCACCACCCUACUGGCGCUU |
| | recruiting | UUAUCUCAUUACUUUGAGAGCCAUCACCAGCGACUAUGUCGUAUGGG |
| | motif | UAAAGCGCUUAUUUAUCGGAGAGAAAUCCGAUAAAUAAGAAGCAUCA |
| | | AAG |
| 2225 | 3′ | UACUGGCGCUUUUAUCUCAUUACUUUGAGAGCCAUCACCAGCGACUA |
| | Hammerhead | UGUCGUAUGGGUAAAGCGCUUAUUUAUCGGAGAGAAAUCCGAUAAAU |
| | ribozyme | AAGAAGCAUCAAAGCGACUACUGAUGAGUCCGUGAGGACGAAACGAG |
| | (Lior Nissim, | UAAGCUCGUCUAGUCG |
| | Timothy Lu) | |
| | smaller scar | |
| 2226 | 3′ env25 pistol | UACUGGCGCUUUUAUCUCAUUACUUUGAGAGCCAUCACCAGCGACUA |
| | ribozyme | UGUCGUAUGGGUAAAGCGCUUAUUUAUCGGAGAGAAAUCCGAUAAAU |
| | (with an added | AAGAAGCAUCAAAGCGUGGUUAGGGCCACGUUAAAUAGUUGCUUAAG |
| | CUUCGG | CCCUAAGCGUUGAUCUUCGGAUCAGGUGCAA |
| | loop) | |
| 2227 | 3′ Env-9 | UACUGGCGCUUUUAUCUCAUUACUUUGAGAGCCAUCACCAGCGACUA |
| | Twister | UGUCGUAUGGGUAAAGCGCUUAUUUAUCGGAGAGAAAUCCGAUAAAU |
| | | AAGAAGCAUCAAAGGGCAAUAAAGCGGUUACAAGCCCGCAAAAAUAG |
| | | CAGAGUAAUGUCGCGAUAGCGCGGCAUUAAUGCAGCUUUAUUG |
| 2228 | =+ATTATCT | UACUGGCGCUUUUAUCUCAUUACUAUUAUCUCAUUACUUUGAGAGCC |
| | CATTACT25 | AUCACCAGCGACUAUGUCGUAUGGGUAAAGCGCUUAUUUAUCGGAGA |
| | | GAAAUCCGAUAAAUAAGAAGCAUCAAAG |
| 2229 | 5′Env-9 | GGCAAUAAAGCGGUUACAAGCCCGCAAAAAUAGCAGAGUAAUGUCGC |
| | Twister | GAUAGCGCGGCAUUAAUGCAGCUUUAUUGUACUGGCGCUUUUAUCUC |
| | | AUUACUUUGAGAGCCAUCACCAGCGACUAUGUCGUAUGGGUAAAGCG |
| | | CUUAUUUAUCGGAGAGAAAUCCGAUAAAUAAGAAGCAUCAAAG |
| 2230 | 3′ Twisted | UACUGGCGCUUUUAUCUCAUUACUUUGAGAGCCAUCACCAGCGACUA |
| | Sister 1 | UGUCGUAUGGGUAAAGCGCUUAUUUAUCGGAGAGAAAUCCGAUAAAU |
| | | AAGAAGCAUCAAAGACCCGCAAGGCCGACGGCAUCCGCCGCCGCUGG |
| | | UGCAAGUCCAGCCGCCCCUUCGGGGGCGGGCGCUCAUGGGUAAC |
| 2231 | no stem | UACUGGCGCUUUUAUCUCAUUACUUUGAGAGCCAUCACCAGCGACUA |
| | | UGUCGUAUGGGUAAAG |
| 2232 | 5′HH15 | GGGAGCCCCGCUGAUGAGGUCGGGGAGACCGAAAGGGACUUCGGUCC |
| | Minimal | CUACGGGGCUCCCUACUGGCGCUUUUAUCUCAUUACUUUGAGAGCCA |
| | Hammerhead | UCACCAGCGACUAUGUCGUAUGGGUAAAGCGCUUAUUUAUCGGAGAG |
| | ribozyme | AAAUCCGAUAAAUAAGAAGCAUCAAAG |
| 2233 | 5′Hammerhead | CCAGUACUGAUGAGUCCGUGAGGACGAAACGAGUAAGCUCGUCUACU |
| | ribozyme | GGCGCUUUUAUCUCAUUACUGGCGCUUUUAUCUCAUUACUUUGAGAG |
| | (Lior Nissim, | CCAUCACCAGCGACUAUGUCGUAUGGGUAAAGCGCUUAUUUAUCGGA |
| | Timothy Lu) | GAGAAAUCCGAUAAAUAAGAAGCAUCAAAG |
| | guide scaffold | |
| | scar | |
| 2234 | 5′Twisted | ACCCGCAAGGCCGACGGCAUCCGCCGCCGCUGGUGCAAGUCCAGCCG |
| | Sister 1 | CCCCUUCGGGGGCGGGCGCUCAUGGGUAACUACUGGCGCUUUUAUCU |
| | | CAUUACUUUGAGAGCCAUCACCAGCGACUAUGUCGUAUGGGUAAAGC |
| | | GCUUAUUUAUCGGAGAGAAAUCCGAUAAAUAAGAAGCAUCAAAG |
| 2235 | 5′sTRSV WT | CCUGUCACCGGAUGUGCUUUCCGGUCUGAUGAGUCCGUGAGGACGAA |
| | viral | ACAGGUACUGGCGCUUUUAUCUCAUUACUUUGAGAGCCAUCACCAGC |
| | Hammerhead | GACUAUGUCGUAUGGGUAAAGCGCUUAUUUAUCGGAGAGAAAUCCGA |
| | ribozyme | UAAAUAAGAAGCAUCAAAG |
| 2236 | 148, =+G55, | GUACUGGCGCCUUUAUCUCAUUACUUUGAGAGCCAUCACCAGCGACU |
| | stacked onto | AUGUCGUAGUGGGUAAAGCGCUUACGGACUUCGGUCCGUAAGAAGCA |
| | 64 | UCAAAG |
| 2237 | 158, | GUACUGGCGCUUUUAUCUGAUUACUUUGAGAGCCAUCACCAGCGACU |
| | 103 + 148 (+G55) | AUGUCGUAGUGGGUAAAGCUCCCUCUUCGGAGGGAGCAUCAAAG |
| | -99, G65U | |
| 2238 | 174, Uvsx | ACUGGCGCUUUUAUCUGAUUACUUUGAGAGCCAUCACCAGCGACUAU |
| | Extended stem | GUCGUAGUGGGUAAAGCUCCCUCUUCGGAGGGAGCAUCAAAG |
| | with [A99] | |
| | G65U), | |
| | C18G, \hat{ }G55, | |
| | [GT-1] | |
| 2239 | 175, extended | ACUGGCGCCUUUAUCUCAUUACUUUGAGAGCCAUCACCAGCGACUAU |
| | stem | GUCGUAUGGGUAAAGCGCUUACGGACUUCGGUCCGUAAGAAGCAUCA |
| | truncation, | AAG |
| | T10C, [GT-1] | |
| 2240 | 176, 174 with | GCUGGCGCUUUUAUCUGAUUACUUUGAGAGCCAUCACCAGCGACUAU |
| | A1G | GUCGUAGUGGGUAAAGCUCCCUCUUCGGAGGGAGCAUCAAAG |
| | substitution | |
| | for T7 | |
| | transcription | |
| 2241 | 177, 174 with | ACUGGCGCUUUUAUCUGAUUACUUUGAGAGCCAUCACCAGCGACUAU |
| | bubble (+G55) | GUCGUAUGGGUAAAGCUCCCUCUUCGGAGGGAGCAUCAAAG |
| | removed | |
| 2242 | 181, stem 42 | ACUGGCGCCUUUAUCUGAUUACUUUGAGAGCCAUCACCAGCGACUAU |
| | (truncated | GUCGUAUGGGUAAAGCGCUUACGGACUUCGGUCCGUAAGAAGCAUCA |
| | stem loop); | AAG |
| | T10C, C18G, | |
| | [GT-1] | |
| | (95+[GT-1]) | |
| 2243 | 182, stem 42 | ACUGGCGCUUUUAUCUGAUUACUUUGAGAGCCAUCACCAGCGACUAU |
| | (truncated | GUCGUAUGGGUAAAGCGCUUACGGACUUCGGUCCGUAAGAAGCAUCA |
| | stem loop); | AAG |
| | C18G, [GT-1] | |
| 2244 | 183, stem 42 | ACUGGCGCUUUUAUCUGAUUACUUUGAGAGCCAUCACCAGCGACUAU |
| | (truncated | GUCGUAGUGGGUAAAGCGCUUACGGACUUCGGUCCGUAAGAAGCAUC |
| | stem loop); | AAAG |
| | C18G, \hat{ }G55, | |
| | [GT-1] | |
| 2245 | 184, stem 48 | ACUGGCGCUUUUAUCUGAUUACUUUGAGAGCCAUCACCAGCGACUAU |
| | (uvsx, -99 | GUCGUAUUGGGUAAAGCUCCCUCUUCGGAGGGAGCAUCAAAG |
| | g65t); | |
| | C18G, \hat{ }T55, | |
| | [GT-1] | |
| 2246 | 185, stem 42 | ACUGGCGCUUUUAUCUGAUUACUUUGAGAGCCAUCACCAGCGACUAU |
| | (truncated | GUCGUAUUGGGUAAAGCGCUUACGGACUUCGGUCCGUAAGAAGCAUC |
| | stem loop); | AAAG |
| | C18G, \hat{ }T55, | |
| | [GT-1] | |
| 2247 | 186, stem 42 | ACUGGCGCCUUUAUCAUCAUUACUUUGAGAGCCAUCACCAGCGACUA |
| | (truncated | UGUCGUAUGGGUAAAGCGCUUACGGACUUCGGUCCGUAAGAAGCAUC |
| | stem loop); | AAAG |
| | T10C, \hat{ }A17, | |
| | [GT-1] | |
| 2248 | 187, stem 46 | ACUGGCGCUUUUAUCUGAUUACUUUGAGAGCCAUCACCAGCGACUAU |
| | (uvsx); | GUCGUAGUGGGUAAAGCGCCCUCUUCGGAGGGAAGCAUCAAAG |
| | C18G, \hat{ }G55, | |
| | [GT-1] | |
| 2249 | 188, stem 50 | ACUGGCGCUUUUAUCUGAUUACUUUGAGAGCCAUCACCAGCGACUAU |
| | (ms2 U15C, | GUCGUAGUGGGUAAAGCUCACAUGAGGAUCACCCAUGUGAGCAUCAA |
| | -99, g65t); | AG |
| | C18G, \hat{ }G55, | |
| | [GT-1] | |
| 2250 | 189, 174 + | ACUGGCACUUUUACCUGAUUACUUUGAGAGCCAACACCAGCGACUAU |
| | G8A; T15C; | GUCGUAGUGGGUAAAGCUCCCUCUUCGGAGGGAGCAUCAAAG |
| | T35A | |
| 2251 | 190, 174 + | ACUGGCACUUUUAUCUGAUUACUUUGAGAGCCAUCACCAGCGACUAU |
| | G8A | GUCGUAGUGGGUAAAGCUCCCUCUUCGGAGGGAGCAUCAAAG |
| 2252 | 191, 174 + | ACUGGCCCUUUUAUCUGAUUACUUUGAGAGCCAUCACCAGCGACUAU |
| | G8C | GUCGUAGUGGGUAAAGCUCCCUCUUCGGAGGGAGCAUCAAAG |
| 2253 | 192, 174 + | ACUGGCGCUUUUACCUGAUUACUUUGAGAGCCAUCACCAGCGACUAU |
| | T15C | GUCGUAGUGGGUAAAGCUCCCUCUUCGGAGGGAGCAUCAAAG |
| 2254 | 193, 174 + | ACUGGCGCUUUUAUCUGAUUACUUUGAGAGCCAACACCAGCGACUAU |
| | 135A | GUCGUAGUGGGUAAAGCUCCCUCUUCGGAGGGAGCAUCAAAG |
| 2255 | 195, 175 + | ACUGGCACCUUUACCUGAUUACUUUGAGAGCCAACACCAGCGACUAU |
| | C18G + | GUCGUAUGGGUAAAGCGCUUACGGACUUCGGUCCGUAAGAAGCAUCA |
| | G8A; T15C; | AAG |
| | T35A | |
| 2256 | 196, 175+ | ACUGGCACCUUUAUCUGAUUACUUUGAGAGCCAUCACCAGCGACUAU |
| | C18G + G8A | GUCGUAUGGGUAAAGCGCUUACGGACUUCGGUCCGUAAGAAGCAUCA |
| | | AAG |
| 2257 | 197, 175 + | ACUGGCCCCUUUAUCUGAUUACUUUGAGAGCCAUCACCAGCGACUAU |
| | C18G + G8C | GUCGUAUGGGUAAAGCGCUUACGGACUUCGGUCCGUAAGAAGCAUCA |
| | | AAG |
| 2258 | 198, 175 + | ACUGGCGCCUUUAUCUGAUUACUUUGAGAGCCAACACCAGCGACUAU |
| | C18G +T35A | GUCGUAUGGGUAAAGCGCUUACGGACUUCGGUCCGUAAGAAGCAUCA |
| | | AAG |
| 2259 | 199, 174 + | GCUGGCGCUUUUAUCUGAUUACUUUGAGAGCCAUCACCAGCGACUAU |
| | A2G (test G | GUCGUAGUGGGUAAAGCUCCCUCUUCGGAGGGAGCAUCAAAG |
| | transcription | |
| | at start; | |
| | ccGCT...) | |
| 2260 | 200, 174 + | GACUGGCGCUUUUAUCUGAUUACUUUGAGAGCCAUCACCAGCGACUA |
| | \hat{ }G1 | UGUCGUAGUGGGUAAAGCUCCCUCUUCGGAGGGAGCAUCAAAG |
| | (ccGACT...) | |
| 2261 | 201, 174 + | ACUGGCGCCUUUAUCUGAUUACUUUGGAGAGCCAUCACCAGCGACUA |
| | T10C; \hat{ }G28 | UGUCGUAGUGGGUAAAGCUCCCUCUUCGGAGGGAGCAUCAAAG |
| 2262 | 202, 174 + | ACUGGCGCAUUUAUCUGAUUACUUUGUGAGCCAUCACCAGCGACUAU |
| | T10A; \hat{ }28T | GUCGUAGUGGGUAAAGCUCCCUCUUCGGAGGGAGCAUCAAAG |
| 2263 | 203, 174 + | ACUGGCGCCUUUAUCUGAUUACUUUGAGAGCCAUCACCAGCGACUAU |
| | T10C | GUCGUAGUGGGUAAAGCUCCCUCUUCGGAGGGAGCAUCAAAG |
| 2264 | 204,174+ | ACUGGCGCUUUUAUCUGAUUACUUUGGAGAGCCAUCACCAGCGACUA |
| | \hat{ }G28 | UGUCGUAGUGGGUAAAGCUCCCUCUUCGGAGGGAGCAUCAAAG |
| 2265 | 205, 174 + | ACUGGCGCAUUUAUCUGAUUACUUUGAGAGCCAUCACCAGCGACUAU |
| | T10A | GUCGUAGUGGGUAAAGCUCCCUCUUCGGAGGGAGCAUCAAAG |
| 2266 | 206, 174 + | ACUGGCGCUUUUAUCUGAUUACUUUGUGAGCCAUCACCAGCGACUAU |
| | A28T | GUCGUAGUGGGUAAAGCUCCCUCUUCGGAGGGAGCAUCAAAG |
| 2267 | 207, 174+ | ACUGGCGCUUUUAUUCUGAUUACUUUGAGAGCCAUCACCAGCGACUA |
| | \hat{ }T15 | UGUCGUAGUGGGUAAAGCUCCCUCUUCGGAGGGAGCAUCAAAG |
| 2268 | 208, 174 + | ACGGCGCUUUUAUCUGAUUACUUUGAGAGCCAUCACCAGCGACUAUG |
| | [T4] | UCGUAGUGGGUAAAGCUCCCUCUUCGGAGGGAGCAUCAAAG |
| 2269 | 209,174+ | ACUGGCGCUUUUAUAUGAUUACUUUGAGAGCCAUCACCAGCGACUAU |
| | C16A | GUCGUAGUGGGUAAAGCUCCCUCUUCGGAGGGAGCAUCAAAG |
| 2270 | 210, 174 + | ACUGGCGCUUUUAUCUUGAUUACUUUGAGAGCCAUCACCAGCGACUA |
| | \hat{ }T17 | UGUCGUAGUGGGUAAAGCUCCCUCUUCGGAGGGAGCAUCAAAG |
| 2271 | 211, 174 + | ACUGGCGCUUUUAUCUGAUUACUUUGAGAGCCAGCACCAGCGACUAU |
| | T35G | GUCGUAGUGGGUAAAGCUCCCUCUUCGGAGGGAGCAUCAAAG |
| | (compare with | |
| | 174 + T35A | |
| | above) | |
| 2272 | 212, 174 + | ACUGGCGCUGUUAUCUGAUUACUUCGAGAGCCAUCACCAGCGACUAU |
| | U11G, | GUCGUAGUGGGUAAAGCUCCCUCUUCGGAGGGAGCAUCGAAG |
| | A105G | |
| | (A86G), | |
| | U26C | |
| 2273 | 213, 174 + | ACUGGCGCUCUUAUCUGAUUACUUCGAGAGCCAUCACCAGCGACUAU |
| | U11C, | GUCGUAGUGGGUAAAGCUCCCUCUUCGGAGGGAGCAUCGAAG |
| | A105G | |
| | (A86G), | |
| | U26C | |
| 2274 | 214, | ACUGGCGCUUGUAUCUGAUUACUCUGAGAGCCAUCACCAGCGACUAU |
| | 174 + U12G; | GUCGUAGUGGGUAAAGCUCCCUCUUCGGAGGGAGCAUCAGAG |
| | A106G | |
| | (A87G), | |
| | U25C | |
| 2275 | 215, 174 + U12C; | ACUGGCGCUUCUAUCUGAUUACUCUGAGAGCCAUCACCAGCGACUAU |
| | A106G | GUCGUAGUGGGUAAAGCUCCCUCUUCGGAGGGAGCAUCAGAG |
| | (A87G), | |
| | U25C | |
| 2276 | 216, | ACUGGCGCUUUGAUCUGAUUACCUUGAGAGCCAUCACCAGCGACUAU |
| | 174_tx_11.G, | GUCGUAGUGGGUAAAGCUCCCUCUUCGGAGGGAGCAUCAAGG |
| | 87.G, 22.C | |
| 2277 | 217, | ACUGGCGCUUUCAUCUGAUUACCUUGAGAGCCAUCACCAGCGACUAU |
| | 174_tx_11.C, | GUCGUAGUGGGUAAAGCUCCCUCUUCGGAGGGAGCAUCAAGG |
| | 87.G, 22.C | |
| 2278 | 218, 174 + | ACUGGCGCUGUUAUCUGAUUACUUUGAGAGCCAUCACCAGCGACUAU |
| | I11G | GUCGUAGUGGGUAAAGCUCCCUCUUCGGAGGGAGCAUCAAAG |
| 2279 | 219, 174 + | ACUGGCGCUUUUAUCUGAUUACUUUGAGAGCCAUCACCAGCGACUAU |
| | A105G | GUCGUAGUGGGUAAAGCUCCCUCUUCGGAGGGAGCAUCGAAG |
| | (A86G) | |
| 2280 | 220, 174 + | ACUGGCGCUUUUAUCUGAUUACUUCGAGAGCCAUCACCAGCGACUAU |
| | U26C | GUCGUAGUGGGUAAAGCUCCCUCUUCGGAGGGAGCAUCAAAG |

[0285] VI. Methods of Constructing the Library

[0286] The libraries described herein may be constructed in a variety of ways. Libraries may be constructed using, for example PCR-based mutagenesis, plasmid recombineering, or other methods known to one of skill in the art to generate protein and RNA variants. In some embodiments, a combination of methods are used to construct one or more variant libraries.

[0287] In some embodiments, PCR-based mutagenesis is used to construct variant RNA libraries, such as sgRNA variant libraries. For example, in some embodiments, a PCR mutagenesis method using degenerate oligonucleotides is used to produce single nucleotide substitution variants. These degenerate oligonucleotides may be synthesized such that each locus of the primer that is complementary to the sgRNA locus has a 97% chance of being the wild type base, and a 1% chance of being each of the other three naturally occurring nucleotides. During PCR, the degenerate oligos may anneal to, and just beyond, the sgRNA scaffold within a small plasmid, amplifying the entire plasmid. The PCR product can then be purified, ligated, and transformed into a cell, such as E. coli, for screening. In other embodiments, a different PCR method is used to construct sgRNA scaffolds with single nucleotide insertions and deletions. For example, a unique PCR reaction is set up for each base pair intended for mutation. These PCR primers can be designed and paired such that PCR products will either be missing a base pair, or contain an additional inserted base pair. For inserted base pairs, PCR primers will insert a degenerate base such that all four possible naturally occurring nucleotides are represented in the final library.

[0288] In some embodiments of the DME methods provided herein, mutations are incorporated into double stranded DNA encoding the biomolecule. This DNA can be maintained and replicated in a standard cloning vector, for example a bacterial plasmid, referred to herein as the target plasmid. In some embodiments, an exemplary target plasmid contains a DNA sequence encoding the reference biomolecule that will be subjected to DME, a bacterial origin of replication, and a suitable antibiotic resistance expression cassette. In some embodiments, the antibiotic resistance cassette confers resistance to Kanamycin, Ampicillin, Spectinomycin, Bleomycin, Streptomycin, Erythromycin, Tetracycline, or Chloramphenicol. In some embodiments, the antibiotic resistance cassette confers resistance to Kanamycin.

[0289] Thus, in some embodiments, provided herein is a method of constructing a library of polynucleotide variants of a reference biomolecule, comprising:
[0290] (a) constructing a polynucleotide that encodes for a variant of the reference biomolecule, wherein the reference biomolecule is a protein or RNA or DNA;
   [0291] wherein the polynucleotide encodes an alteration of one or more monomer locations of the reference biomolecule, wherein the monomer is an amino acid of the protein or ribonucleotide of the RNA or deoxyribonucleotide of DNA, and
   [0292] wherein each alteration of a monomer location is independently selected from the group consisting of substitution of the monomer, deletion of one or more consecutive monomers beginning at the location, and insertion of one or more consecutive monomers adjacent to the location; and
[0293] (b) repeating the polynucleotide construction of (a) a sufficient number of times such that the library of polynucleotide represents variants comprising a single alteration of a single location for at least 1% of the monomer locations of the biomolecule.

[0294] Said methods of polynucleotide library construction may be used to produce a polynucleotide library representing any of the variant libraries described herein. For example, such methods may be used to construct a library of polynucleotides representing variants comprising a single alteration of a single location for at least 5%, at least 10%, at least 30%, at least 70%, at least 90%, or any other % described herein of the total monomer locations of the reference biomolecule; or variants comprising substitution of the monomer, variants comprising deletion of one or more monomers beginning at the location, and variants comprising insertion of one or more new monomers adjacent to the location for at least 1%, at least 5%, at least 10%, at least 30%, at least 50%, at least 70%, at least 90%, or other % of monomer locations; and wherein insertion comprises insertion of one to four monomers; or deletion comprises deletion of one to four monomers; or substitution comprises substitution with each of the other naturally occurring monomers; or variants each independently comprising alteration of one, two, three, four, five, six, seven, eight, nine, ten, eleven, twelve, thirteen, fourteen, fifteen, sixteen, seventeen, eighteen, nineteen, twenty, or more locations, wherein the library as a whole represents alteration of at least 5%, at least 10%, at least 30%, at least 70%, or at least 90% of the total locations of the reference biomolecule; or any combinations thereof, or any other variant libraries described herein. In some embodiments, each variant biomolecule independently comprises alteration of between one to twenty, between one to ten, between one to five, between five to ten, between five to fifteen, between five to twenty, between ten to fifteen, between ten to twenty, between fifteen to twenty, or between three to seven, or between three to ten monomer locations.

[0295] A library comprising said variants can be constructed in a variety of ways. In certain embodiments, plasmid recombineering is used to construct a library. Such methods can use DNA oligonucleotides encoding one or more mutations to incorporate said mutations into a plasmid encoding the reference biomolecule. For biomolecule variants with a plurality of mutations, in some embodiments more than one oligonucleotide is used. In some embodiments, the DNA oligonucleotides encoding one or more mutations wherein the mutation region is flanked by between 10 and 100 nucleotides of homology to the target plasmid, both 5′ and 3′ to the mutation. Such oligonucleotides can in some embodiments be commercially synthesized and used in PCR amplification. An exemplary template for an oligonucleotide encoding a mutation is provided below
[0296] 5′-(N)₁₀₋₁₀₀−Mutation−(N′)₁₀₋₁₀₀−3′
   wherein the region encoding the mutation is flanked on the 5′ and 3′ ends by between 10 to 100 (independently) nucleotides that are homologous to the target plasmid (e.g., “homology arms”). The region encoding the desired mutation or mutations will comprise three nucleotides encoding an amino acid (for substitutions or single insertions), or zero nucleotides (for deletions). In some embodiments the oligonucleotide encodes insertion of greater than one amino acid. For example, wherein the oligonucleotide encodes the insertion of X amino acids, the region encoding the desired mutation comprises 3*X nucleotides encoding the X amino acids. In some embodiments, the mutation region encodes more than one mutation, for example mutations to two or more monomers of a biomolecule that are in close proximity (e.g., next to each other, or within 1, 2, 3, 4, 5, 6, 7, 8, 9, or 10, or more monomers of each other).

[0297] Such exemplary oligonucleotides may, for example, encode protein variants or RNA variants. For example, wherein the reference biomolecule is a protein, 40 different amino acid mutations to a single monomer in a protein can be encoded using 40 different oligonucleotides comprising the same set of homology arms (e.g., substitution with each of the 19 other naturally occurring amino acids, single insertion of each of the 20 naturally occurring amino acids, and single deletion of the original amino acid). In some embodiments, wherein the reference biomolecule is RNA, 8 possible oligonucleotides, using one set of homology arms, can be used to encode the 8 different nucleotide mutations to a single monomer (e.g., substitution with each of the other three naturally occurring nucleotides, single insertion of each of the 4 naturally occurring nucleotides, and single deletion of the original nucleotide). In some embodiments, wherein one or more non-natural monomers is used, additional oligonucleotides are constructed. In some embodiments, different pairs of homology arms (e.g., pairs of homology arms of different lengths) can be used to encode variants of the same target monomer or monomers.

[0298] Nucleotide sequences code for particular amino acid monomers in a substitution or insertion mutation in an oligo as described herein will be known to the person of ordinary skill in the art. For example, TTT or TTC triplets can be used to encode phenylalanine; TTA, TTG, CTT, CTC, CTA or CTG can be used to encode leucine; ATT, ATC or ATA can be used to encode isoleucine; ATG can be used to encode methionine; GTT, GTC, GTA or GTG c can be used to encode valine; TCT, TCC, TCA, TCG, AGT or AGC can be used to encode serine; CCT, CCC, CCA or CCG can be used to encode proline; ACT, ACC, ACA or ACG can be used to encode threonine; GCT, GCC, GCA or GCG can be used to encode alanine; TAT or TAC can be used to encode tyrosine; CAT or CAC can be used to encode histidine; CAA or CAG can be used to encode glutamine, AAT or AAC can be used to encode asparagine; AAA or AAG can be used to encode lysine; GAT or GAC can be used to encode aspartic acid; GAA or GAG can be used to encode glutamic acid; TGT or TGC c can be used to encode cysteine; TGG can be used to encode tryptophan; CGT, CGC, CGA, CGG, AGA or AGG can be used to encode arginine; and GGT, GGC, GGA or GGG can be used to encode glycine. In addition, ATG is used for initiation of the peptide synthesis as well as for methionine and TAA, TAG and TGA can be used to encode for the termination of the peptide synthesis.

[0299] In some exemplary embodiments where the reference biomolecule undergoing DME is an RNA, 8 different oligonucleotides, using the same set of homology arms, encode the above enumerated 8 different single nucleotide mutations for each nucleotide in the RNA that is targeted for DME. When the mutation is of a single ribonucleotide, the region of the oligo encoding the mutations can consist of the following nucleotide sequences: one nucleotide specifying a nucleotide (for substitutions or insertions), or zero nucleotides (for deletions). In some embodiments, the oligonucleotides are synthesized as single stranded DNA oligonucleotides. In some embodiments, all oligonucleotides targeting a particular amino acid or nucleotide of a biomolecule subjected to DME are pooled. In some embodiments, all oligonucleotides targeting a biomolecule subjected to DME are pooled. There is no limit to the type or number of mutations that can be created simultaneously in a library.

[0300] Therefore, in some aspects, provided herein is a library of variant oligonucleotides, wherein:
[0301] each variant oligonucleotide independently encodes an alteration of one or more sequential monomer locations of a reference biomolecule, wherein:
[0302] the reference biomolecule is a protein, RNA, or DNA,
[0303] the one or more monomers are one or more amino acids of the protein or ribonucleotides of the RNA or deoxyribonucleotide of the DNA, and
[0304] wherein each alteration of a monomer location is independently selected from the group consisting of substitution of the monomer, deletion of one or more consecutive monomers beginning at the location, and insertion of one or more consecutive monomers adjacent to the location;
[0305] each variant oligonucleotide comprises a pair of homology arms flanking the encoded alteration, wherein the homology arms are homologous to the reference biomolecule sequences flanking the corresponding monomer location alteration, and wherein each homology arm independently comprises between 10 to 100 nucleotides; and
[0306] the library of variant oligonucleotides represents alteration of a single monomer for at least 1% of monomer locations.

[0307] In some embodiments, the library of variant oligonucleotides represents alteration of a single monomer for at least 5%, at least 10%, at least 20%, at least 30%, at least 40%, at least 50%, at least 60%, at least 70%, at least 80%, at least 90%, at least 95%, at least 99%, or 100% of monomer locations. In certain embodiments, the library of variant oligonucleotides represents alteration of a single monomer for between 10% to 100%, between 20% to 100%, between 30% to 100%, between 40% to 100%, between 50% to 100%, between 60% to 100%, between 70% to 100%, between 80% to 100, or between 90% to 100% of monomer locations. In some embodiments, the library of variant oligonucleotides represents a library of variant biomolecules, wherein each variant biomolecule independently comprises alteration of one, two, three, four, five, six, seven, eight, nine, ten, eleven, twelve, thirteen, fourteen, fifteen, sixteen, seventeen, eighteen, nineteen, twenty or more locations, wherein the library as a whole represents alteration of at least 5%, at least 10%, at least 30%, at least 70%, or at least 90% of the total locations of the reference biomolecule. In some embodiments, the library of variant oligonucleotides represents a library of variant biomolecules, wherein each variant biomolecule independently comprises alteration of between one to twenty, between one to ten, between one to five, between five to ten, between five to fifteen, between five to twenty, between ten to fifteen, between ten to twenty, between fifteen to twenty, or between three to seven, or between three to ten monomer locations.

[0308] Plasmid recombineering can then be used to recombine these synthetic mutations into a target gene of interest. In some embodiments of plasmid recombineering methods, a target plasmid encoding the reference protein, a standard bacterial origin of replication, and an antibiotic resistance cassette (e.g., an antibiotic resistance cassette conferring resistance to Kanamycin, Ampicillin, Spectinomycin, Bleomycin, Streptomycin, Erythromycin, Tetracycline, or Chloramphenicol) is constructed. A library of oligonucleotides encoding the desired mutation may be constructed, for example, through commercial synthesis. A plurality of plasmids and the library of oligonucleotides are combined and introduced into an expression cell, for example introduced into E. coli (such as EcNR2 cells) using electroporation. The electroporated cells are then grown in the presence of the antibiotic, selecting for cells that have been transformed with the plasmid. Plasmids from these transformed cells are isolated using standard methods known to one of skill in the art, resulting in a plurality of plasmids, into at least some of which an oligonucleotide encoding for the desired mutation has been incorporated. Thus, at least a portion of the plasmids encode for protein variants. The isolated plasmids may also include plasmids that encode the reference protein, without incorporating any mutations. For example, in some embodiments, a single round of plasmid recombineering may produce a plurality of plasmids in which 10-30% independently encode for protein variants. Performing another round of plasmid recombineering using the plurality of isolated plasmids with another library of oligonucleotides (either the same library or a new library) may, in some embodiments, increase the total percentage of plasmids that encode for a protein variant. In certain embodiments, performing additional rounds of plasmid recombineering using plasmids from the previous round also results in stacking of mutations, for example producing plasmids that encode for variants comprising two, three, four, five, or more monomer alterations.

[0309] Therefore, in some aspects, provided herein is a vector library comprising a plurality of vectors, wherein each vector independently comprises one variant oligonucleotide of an oligonucleotide library as described herein. In certain embodiments, the vectors are constructed using plasmid recombineering. Exemplary vectors may include, but are not limited to, lentiviral vectors, adenoviral vectors, adeno-associated viral (AAV) vectors, and bacterial plasmids. In some embodiments, the vector is a bacterial plasmid further comprising a bacterial origin of replication and an antibiotic resistance expression cassette (e.g., conferring resistance to Kanamycin, Ampicillin, Spectinomycin, Bleomycin, Streptomycin, Erythromycin, Tetracycline or Chloramphenicol).

[0310] Further provided are methods of selecting a biomolecule variant, comprising producing a library of reference biomolecule variants from a polynucleotide variant library as described herein, or a vector library as described herein; screening the library of biomolecule variants for one or more functional characteristics; and selecting a biomolecule variant from the library.

[0311] In some embodiments, for certain libraries, methods of plasmid recombineering must be altered. For example, for some libraries, additional rounds plasmid recombineering are needed to construct enough vectors of sufficient diversity to adequately sample the desired alteration space of the reference molecule (e.g., 2, 3, 4, 5, 6, 7, 8, 9, 10, 11, or more rounds). In certain embodiments, a higher concentration of oligos encoding the alterations must be combined with the plasmid vectors to construct enough vectors of sufficient diversity to adequately sample the desired alteration space of the reference molecule. In some variations, the number of additional rounds and/or increased concentration of oligos does not have a linear relationship with the increased sampling space needed. Certain parameters may therefore be affected by reference biomolecule size and/or level of desired diversity in the library, but cannot be derived directly in a linear relationship in some embodiments.

[0312] In other embodiments, methods other than plasmid recombineering are used to construct one or more DME libraries, or a combination of plasmid recombineering and other methods are used to construct one or more DME libraries. For example, DME libraries may, in some embodiments, be constructed using one of the other mutational methods described herein. Such libraries may then be taken through the library screening as described herein, and further iterations be carried out if desired.

[0313] Collectively, the methods of the disclosure result in variants of CasX proteins and guides that can form ribonucleoprotein complexes (RNP), or gene editing pairs, that, in some embodiments, have one or more improved characteristics compared to a gene editing pair of a reference CasX and reference guide RNA. Exemplary improved characteristics, as described herein, may in some embodiments, and include improved CasX:gNA RNP complex stability, improved binding affinity between the CasX and gNA, improved kinetics of RNP complex formation, higher percentage of cleavage-competent RNP, improved RNP binding affinity to the target DNA, improved unwinding of the target DNA, increased editing activity, improved editing efficiency, improved editing specificity, increased activity of the nuclease, increased target strand loading for double strand cleavage, decreased target strand loading for single strand nicking, decreased off-target cleavage, improved binding of the non-target strand of DNA, or improved resistance to nuclease activity. In the foregoing embodiments, the improvement is at least about 2-fold, at least about 5-fold, at least about 10-fold, at least about 50-fold, at least about 100-fold, at least about 500-fold, at least about 1000-fold, at least about 5000-fold, at least about 10,000-fold, or at least about 100,000-fold compared to the characteristic of a reference CasX protein and reference gNA pair. In other cases, the one or more of the improved characteristics may be improved about 1.1 to 100,00×, about 1.1 to 10,00×, about 1.1 to 1,000×, about 1.1 to 500×, about 1.1 to 100×, about 1.1 to 50×, about 1.1 to 20×, about 10 to 100,00×, about 10 to 10,00×, about 10 to 1,000×, about 10 to 500×, about 10 to 100×, about 10 to 50×, about 10 to 20×, about 2 to 70×, about 2 to 50×, about 2 to 30×, about 2 to 20×, about 2 to 10×, about 5 to 50×, about 5 to 30×, about 5 to 10×, about 100 to 100,00×, about 100 to 10,00×, about 100 to 1,000×, about 100 to 500×, about 500 to 100,00×, about 500 to 10,00×, about 500 to 1,000×, about 500 to 750×, about 1,000 to 100,00×, about 10,000 to 100,00×, about 20 to 500×, about 20 to 250×, about 20 to 200×, about 20 to 100×, about 20 to 50×, about 50 to 10,000×, about 50 to 1,000×, about 50 to 500×, about 50 to 200×, or about 50 to 100×, improved relative to a reference gene editing pair. In other cases, the one or more of the improved characteristics may be improved about 1.1×, 1.2×, 1.3×, 1.4×, 1.5×, 1.6×, 1.7×, 1.8×, 1.9×, 2×, 3×, 4×, 5×, 6×, 7×, 8×, 9×, 10×, 11×, 12×, 13×, 14×, 15×, 16×, 17×, 18×, 19×, 20×, 25×, 30×, 40×, 45×, 50×, 55×, 60×, 70×, 80×, 90×, 100×, 110×, 120×, 130×, 140×, 150×, 160×, 170×, 180×, 190×, 200×, 210×, 220×, 230×, 240×, 250×, 260×, 270×, 280×, 290×, 300×, 310×, 320×, 330×, 340×, 350×, 360×, 370×, 380×, 390×, 400×, 425×, 450×, 475×, or 500× improved relative to a reference gene editing pair. In some embodiments, the variant gene editing pair comprises a gNA variant comprising a sequence of any one of SEQ ID NOs: 2101-2280 and a CasX variant of Table 1. In some embodiments, the gene editing pair comprises a CasX selected from any one of CasX 119, CasX 438, CasX 457, CasX 488, or CasX 491 and a gNA selected from any one of SEQ ID NOS: 2104, 2106, or 2238.

[0314] The description herein sets forth numerous exemplary configurations, methods, parameters, and the like. It should be recognized, however, that such description is not intended as a limitation on the scope of the present disclosure, but is instead provided as a description of exemplary embodiments.

[0315] VII. Kits and Articles of Manufacture

[0316] In some aspects, provided herein are kits comprising a biomolecule protein variant as described herein and a suitable container (for example a tube, vial or plate).

[0317] In some embodiments, the biomolecule variant is a Cas protein variant (such as a CasX variant protein). In some embodiments, the biomolecule variant is a CasX variant protein, and the kit further comprises a CasX guide RNA variant as described herein, or the reference guide RNA of SEQ ID NO: 4 or SEQ ID NO: 5.

[0318] In other embodiments, the biomolecule variant is a gRNA variant (such as a gRNA variant that binds to CasX). In some embodiments, the biomolecule variant is a CasX gRNA variant and the kit further comprises a CasX variant protein as described herein, or the reference CasX protein of SEQ ID NO: 1, SEQ ID NO: 2, or SEQ ID NO: 3.

[0319] In certain embodiments, provided herein are kits comprising a CasX protein and gRNA pair comprising a CasX variant protein and a CasX gRNA variant as described herein.

[0320] In some embodiments, the kit further comprises a buffer, a nuclease inhibitor, a protease inhibitor, a liposome, a therapeutic agent, a label, a label visualization reagent, or any combination of the foregoing. In some embodiments, the kit further comprises a pharmaceutically acceptable carrier, diluent or excipient.

[0321] In some embodiments, the kit comprises appropriate control compositions for gene editing applications, and instructions for use.

[0322] In some embodiments, the kit comprises a vector comprising a sequence encoding a CasX variant protein of the disclosure, a CasX gRNA variant of the disclosure, or a combination thereof.

### EXAMPLES

[0323] The following Examples are merely illustrative and are not meant to limit any aspects of the present disclosure in any way.

### Example 1: Assays Used to Measure sgRNA and CasX Protein Activity

[0324] Several assays were used to carry out initial screens of CasX protein and sgRNA DME libraries and engineered mutants, and to measure the activity of select protein and sgRNA variants relative to CasX reference sgRNAs and proteins.

[0325] E. coli CRISPRi screen: Briefly, biological triplicates of dead CasX DME Libraries on a chloramphenicol (CM) resistant plasmid with a GFP guide RNA on a carbenicillin (Carb) resistant plasmid were transformed (at >5× library size) into MG1655 with genetically integrated and constitutively expressed GFP and RFP (see FIG. 13A-13B). Cells were grown overnight in EZ-RDM+Carb, CM and Anhydrotetracycline (aTc) inducer. E. coli were FACS sorted based on gates for the top 1% of GFP but not RFP repression, collected, and resorted immediately to further enrich for highly functional CasX molecules. Double sorted libraries were then grown out and DNA was collected for deep sequencing on a highseq. This DNA was also re-transformed onto plates and individual clones were picked for further analysis.

[0326] E. coli Toxin selection: Briefly, carbenicillin resistant plasmid containing an arabinose inducible toxin were transformed into E. coli cells and made electrocompetent. Biological triplicates of CasX DME Libraries with a toxin targeted guide RNA on a chloramphenicol resistant plasmid were transformed (at >5× library size) into said cells and grown in LB+CM and arabinose inducer. E. coli that cleaved the toxin plasmid survived in the induction media and were grown to mid log and plasmids with functional CasX cleavers were recovered. This selection was repeated as needed. Selected libraries were then grown out and DNA was collected for deep sequencing on a highseq. This DNA was also re-transformed onto plates and individual clones were picked for further analysis and testing.

[0327] Lentiviral based screen: Lentiviral particles were produced in HEK293 cells at a confluency of 70%-90% at time of transfection. Cells were transfected using polyethylenimine based transfection of plasmids containing a CasX DME library. Lentiviral vectors were co-transfected with the lentiviral packaging plasmid and the VSV-G envelope plasmids for particle production. Media was changed 12 hours post-transfection, and virus harvested at 36-48 hours post-transfection. Viral supernatants were filtered using 0.45 mm membrane filters, diluted in cell culture media if appropriate, and added to target cells HEK cells with an Integrated GFP reporter. Polybrene was supplemented to enhance transduction efficiency, if necessary. Transduced cells were selected for 24-48 hr post-transduction using puromycin and grown for 7-10 days. Cells were then sorted for GFP disruption & collected for highly functional CasX sgRNA or protein variants. Libraries were then Amplified via PCR directly from the genome and collected for deep sequencing on a highseq. This DNA could also be re-cloned and re-transformed onto plates and individual clones were picked for further analysis.

[0328] Assaying editing efficiency of an EGFP reporter: To assay the editing efficiency of CasX reference sgRNAs and proteins and variants thereof, EGFP HEK293T reporter cells were seeded into 96-well plates and transfected according to the manufacturer's protocol with lipofectamine 3000 (Life Technologies) and 100-200 ng plasmid DNA encoding a reference or variant CasX protein, P2A—puromycin fusion and the reference or variant sgRNA. The next day cells were selected with 1.5 μg/ml puromycin for 2 days and analyzed by fluorescence-activated cell sorting (FACS) 7 days after selection to allow for clearance of EGFP protein from the cells. EGFP disruption via editing was traced using an Attune NxT Flow Cytometer and high-throughput autosampler.

### Example 2: Cleavage Efficiency of CasX Reference sgRNA

[0329] The reference CasX sgRNA of SEQ ID NO: 4 (below) is described in WO 2018/064371, the contents of which are incorporated herein by reference.

(SEQ ID NO: 4)
ACAUCUGGCGCGUUUAUUCCAUUACUUUGGAGCCAGUCCCAGCGACUAU
GUCGUAUGGACGAAGCGCUUAUUUAUCGGAGAGAAACCGAUAAGUAAAA
CGCAUCAAAG.

[0330] It was found that alterations to the sgRNA reference sequence of SEQ ID NO: 4, producing SEQ ID NO: 5 (below) were able to improve CasX cleavage efficiency.

(SEQ ID NO: 5)
UACUGGCGCUUUUAUCUCAUUACUUUGAGAGCCAUCACCAGCGACUAUG
UCGUAUGGGUAAAGCGCUUAUUUAUCGGAGAGAAAUCCGAUAAAUAAGA
AGCAUCAAAG.

[0331] To assay the editing efficiency of CasX reference sgRNAs and variants thereof, EGFP HEK293T reporter cells were seeded into 96-well plates and transfected according to the manufacturer's protocol with lipofectamine 3000 (Life Technologies) and 100-200 ng plasmid DNA encoding a reference CasX protein, P2A—puromycin fusion and the sgRNA. The next day cells were selected with 1.5 μg/ml puromycin for 2 days and analyzed by fluorescence-activated cell sorting (FACS) 7 days after selection to allow for clearance of EGFP protein from the cells. EGFP disruption via editing was traced using an Attune NxT Flow Cytometer and high-throughput autosampler.

[0332] When testing cleavage of an EGFP reporter by CasX reference and sgRNA variants, the following spacer target sequences were used:

E6 (TGTGGTCGGGGTAGCGGCTG; SEQ ID NO: 29)
and
E7
(TCAAGTCCGCCATGCCCGAA; SEQ ID NO: 30).

[0333] An example of the increased cleavage efficiency of the sgRNA of SEQ ID NO: 5 compared to the sgRNA of SEQ ID NO: 4 is shown in FIG. 5A. Editing efficiency of SEQ ID NO: 5 was improved 176% compared to SEQ ID NO: 4. Accordingly, SEQ ID NO: 5 was chosen as reference sgRNA for DME and additional sgRNA variant design, described below.

### Example 3: Mutagenesis of CasX References gRNA Produces Variants with Improved Target Cleavage

[0334] DME of the sgRNA was achieved using two distinct PCR methods. The first method, which generates single nucleotide substitutions, makes use of degenerate oligonucleotides. These are synthesized with a custom nucleotide mix, such that each locus of the primer that is complementary to the sgRNA locus has a 97% chance of being the wild type base, and a 1% chance of being each of the other three nucleotides. During PCR, the degenerate oligos anneal to, and just beyond, the sgRNA scaffold within a small plasmid, amplifying the entire plasmid. The PCR product was purified, ligated, and transformed into E. coli. The second method was used to generate sgRNA scaffolds with single or double nucleotide insertions and deletions. A unique PCR reaction was set up for each base pair intended for mutation: In the case of the CasX scaffold of SEQ ID NO: 5, 109 PCRs were used. These PCR primers were designed and paired such that PCR products were either missing a base pair, or contained an additional inserted base pair. For inserted base pairs, PCR primers inserted a degenerate base such that all four possible nucleotides were represented in the final library.

[0335] Once constructed, both the protein and sgRNA DME libraries were assayed in a screen or selection as described in Example 1 to quantitatively identify mutations conferring enhanced functionality. Any assay, such as cell survival or fluorescence intensity, is sufficient so long as the assay maintains a link between genotype and phenotype. High throughput sequencing of these populations and validating individual variant phenotypes provided information about mutations that affect functionality as assayed by screening or selection. Statistical analysis of deep sequencing data provided detailed insight into the mutation landscape and mechanism of protein function or guide RNA function (see FIGS. 3A-3B, FIG. 4A, 4B, 4C).

[0336] DME libraries of sgRNA variants were made using a reference gRNA of SEQ ID NO: 5, underwent selection or enrichment, and were sequenced to determine the fold enrichment of the sgRNA variants in the library. The libraries included every possible single mutation of every nucleotide, and double indels (insertion/deletions). The results are shown in FIGS. 3A-3B, FIGS. 4A-4C, and Tables 4-26 below.

[0337] To create a library of base pair substitutions using DME, two degenerate oligonucleotides that each bind to half of the sgRNA scaffold and together amplify the entire plasmid comprising the starting sgRNA scaffold were designed. These oligos were made from a custom nucleotide mix with a 3% mutation rate. These degenerate oligos were then used to PCR amplify the starting scaffold plasmid using standard manufacturing protocols. This PCR product was gel purified, again following standard protocols. The gel purified PCR product was then blunt end ligated and electroporated into an appropriate E. coli cloning strain. Transformants were grown overnight on standard media, and plasmid DNA was purified via miniprep.

[0338] To generate a library of small insertions and deletions, PCR primers were designed such that the PCR products resulting from amplification of the plasmid comprising the base sgRNA scaffold would either be missing a base pair, or contain an additional inserted base pair. For inserted base pairs, PCR primers were designed in which a degenerate base has been inserted, such that all four possible nucleotides were represented in the final library of pooled PCR products. The starting sgRNA scaffold was then PCR amplified with each set of oligos as their own reaction. Each PCR reaction contained five possible primers, although all primers annealed to the same sequence. For example, Primer 1 omitted a base, in order to create a deletion. Primers 2, 3, 4, and 5 inserted either an A, T, G, or C. However, these five primers all annealed to the same region and hence could be pooled in a single PCR. However, PCRs for different positions along the sgRNA needed to be kept in separate tubes, and 109 distinct PCR reactions were used to generate the sgRNA DME library.

[0339] The resulting 109 PCR products were then run on an agarose gel and excised before being combined and purified. The pooled PCR products were blunt ligated and electroporated into E. coli. Transformants were grown overnight on standard media with an appropriate selectable marker, and plasmid DNA was purified via miniprep. Having created a library of all single small indels, the steps of PCR amplifying the starting plasmid with each set of oligos, purifying, blunt end ligating, transforming into E. coli and miniprepping can be repeated to obtain a library containing most double small indels. Combining the single indel library and double indel library at a ratio of 1:1000 resulted in a library that represented both single and double indels.

[0340] The resulting libraries were then combined and passed through screening and/or selection process to identify variants with enhanced cleavage activity. DME libraries were screened using toxin cleavage and CRISPRi repression in E. coli, as well as EGFP cutting in lentiviral-transfected HEK293 cells, as described in Example 1. The fold enrichment of scaffold variants in DME libraries that have undergoing screening/selection followed by sequencing is shown below in Tables 4-26. The read counts associated with each of the below sequences in Tables 4-26 were determined (‘annotations’, ‘seq’). Only sequences with at least 10 reads across any sample were analyzed to filter from 15 Million to 600 K sequences. The below ‘seq’ gives the sequence of the entire insert between the two 5′ random 5mer and the 3′ random 5mer. ‘seq_short’ gives the anticipated sequence of the scaffold only. The mutations associated with each sequence were determined through alignment (‘muts’). All alterations are indicated by their [position (0-indexed)].[reference base].[alternate base]. Position 0 indicates the first T of the transcribed gRNA. Sequences with multiple mutations are semicolon separated. The column muts_1indexed, gives the same information but 1-indexed instead of 0-indexed. Each of the modifications are annotated (‘annotated_variants’), as being a single substitution/insertion/deletion, double substitution/insertion/deletion, single_del_single_sub (a deletion and an adjacent substitution), a single_sub_single_ins (a substitution and adjacent insertion), ‘outside_ref’ (indicates that the alteration is outside the transcribed gRNA), or ‘other’ (any larger substitution/insertion/deletion or some combination thereof). An insertion at position i indicates an inserted base between position i-1 and i (i.e. before the indicated position). To note about variant annotation: a deletion of any one of a consecutive set of bases can be attributed to any of those bases. Thus, a deletion of the T at position −1 is the same sequence as a deletion of the T at position 0. ‘counts’ indicates the sequencing-depth normalized read count per sequence per sample. Technical replicates were combined by taking the geometric mean. ‘log2enrichment’ gives the median enrichment (using a pseudocount of 10) across each context, or across all samples, after merging for technical replicates. The naive read count was averaged (geometric) between the D2_N and D3_N samples. Finally, the ‘log2enrichment_err’ gives the ‘confidence interval’ on the mean log2 enrichment. It is the standard deviation of the enrichment across samples*2/sqrt of the number of samples. Below, only the sequences with median log2enrichment−log2enrichment_err>0 are shown (2704/614564 sequences examined). Tables 4-26. Encoding sequences of exemplary CasX sg RNA variants and resulting activity. CI indicates confidence interval; MI indicates median enrichment, which indicates enhanced activity.

TABLE 4

| | SEQ | | | |
|---|---|---|---|---|
| index | ID NO | muts_1indexed | MI | 95% CI |
| 7240543 | 367 | 27.-.C; 76.G.- | 3.389759419 | 2.039653812 |
| 7240150 | 368 | 27.-.C; 75.-.0 | 3.111121121 | 1.861731632 |
| 2584994 | 369 | 0.T.-; 2.A.C; 27.-.0 | 2.99728039 | 1.806144082 |
| 2618163 | 370 | 0.T.-; 2.A.C; 55.-.G | 2.914525039 | 0.724917266 |
| 2655870 | 371 | 2.A.C; 0.T.-; 76.GG.-A | 2.902927654 | 0.391463755 |
| 2762330 | 372 | 2.A.C; 0.T.-; 55.-.T | 2.856516028 | 1.28972451 |
| 7247368 | 373 | 27.-.C; 86.C.- | 2.83486805 | 1.637226249 |
| 2731505 | 374 | 2.A.C; 0.T.-; 75.-.G | 2.79481581 | 0.624981577 |
| 2729600 | 375 | 2.A.C; 0.T.-; 76.-.T | 2.791450948 | 0.628411541 |
| 2701142 | 376 | 2.A.C; 0.T.-; 87.-.T | 2.767966305 | 0.559343857 |
| 2659588 | 377 | 2.A.C; 0.T.-; 75.-.0 | 2.732934068 | 0.47710005 |
| 2582823 | 378 | 0.T.-; 2.A.C; 27.-.A | 2.729090618 | 1.668805537 |
| 3000598 | 379 | 1.TA.--; 76.G.- | 2.704136598 | 0.439453245 |
| 10565036 | 380 | 15.-.T; 74.-.T | 2.681400766 | 0.808439581 |
| 9696472 | 381 | 28.-.T; 76.GG.-T | 2.681108849 | 1.714840304 |
| 2674674 | 382 | 2.A.C; 0.T.-; 86.-.0 | 2.6499525 | 0.771736317 |
| 7254130 | 383 | 27.-.C; 75.CG.-T | 2.62887552 | 1.755487816 |
| 2977442 | 384 | 1.TA.--; 55.-.G | 2.628550631 | 0.887370086 |
| 2661951 | 385 | 2.A.C; 0.T.-; 76.G.- | 2.626541337 | 0.431834643 |
| 1937646 | 386 | 2.A.C; 0.TT.--; 75.-.C | 2.626298021 | 1.328305588 |
| 2232796 | 387 | 0.T.-; 55.-.G | 2.606847968 | 0.776502589 |
| 2714418 | 388 | 0.T.-; 2.A.C; 81.GA.-T | 2.595247917 | 0.442508417 |
| 2700142 | 389 | 2.A.C; 0.T.-; 87.-.G | 2.581884688 | 0.608402275 |
| 2667512 | 390 | 2.A.C; 0.T.-; 77.GA.-- | 2.576796073 | 0.588238221 |
| 7239606 | 391 | 27.-.C; 76.-.A | 2.565846214 | 1.440612113 |
| 10563356 | 392 | 15.-.T; 75.-.G | 2.55742746 | 1.055615566 |
| 7181049 | 393 | 27.-.A; 75.-.0 | 2.542663573 | 1.893477285 |
| 2720034 | 394 | 2.A.C; 0.T.-; 78.-.0 | 2.5314705 | 0.491793711 |
| 2265581 | 395 | 0.T.-; 86.-.0 | 2.51980638 | 0.504274578 |
| 2256355 | 396 | 0.T.-; 76.GG.-C | 2.516497885 | 0.942311138 |
| 7251229 | 397 | 27.-.C; 76.-.G | 2.516430339 | 1.79266874 |
| 10281529 | 398 | 17.-.T; 76.GG.-A | 2.515423121 | 1.103585285 |
| 2299702 | 399 | 0.T.-; 74.-.T | 2.504423509 | 0.391893392 |
| 2670445 | 400 | 2.A.C; 0.T.-; 85.T.- | 2.498536138 | 1.225406412 |
| 2258816 | 401 | 0.T.-; 76.G.- | 2.494311051 | 0.474787855 |
| 7241311 | 402 | 27.-.C; 77.GA.-- | 2.492787478 | 1.594841999 |
| 2658150 | 403 | 2.A.C; 0.T.-; 76.GG.-C | 2.491526929 | 0.585113234 |
| 2734378 | 404 | 2.A.C; 0.T.-; 74.-.T | 2.489805276 | 0.484841997 |
| 2723181 | 405 | 2.A.C; 0.T.-; 76.-.6 | 2.488387029 | 0.421138525 |
| 2288202 | 406 | 0.T.-; 81.GA.-T | 2.487414543 | 0.591223915 |
| 2278172 | 407 | 0.T.-; 89.-.0 | 2.48621302 | 0.689529044 |
| 2997382 | 408 | 1.TA.--; 76.GG.-A | 2.465426966 | 1.066239003 |
| 255017 | 409 | 0.T.-:76.GG.-A | 2.463250003 | 0.421992457 |
| 2257399 | 410 | 0.T.-; 75.-.0 | 2.460412385 | 0.675576028 |
| 12183183 | 411 | 2.A.-; 81.GA.-T | 2.459190685 | 0.736058302 |
| 7252067 | 412 | 27.-.C; 76.GG.-T | 2.45896207 | 2.062274813 |
| 10525083 | 413 | 15.-.T; 75.-.0 | 2.448013673 | 1.006223409 |
| 7253869 | 414 | 27.-.C; 74.-.T | 2.439328513 | 1.638183736 |
| 4303777 | 415 | 4.T.-; 76.-.T | 2.435110112 | 0.781688536 |
| 2741395 | 416 | 2.A.C; 0.T.-; 73.A.- | 2.434901914 | 0.633362915 |
| 7250940 | 417 | 27.-.C; 78.A.- | 2.423359724 | 2.064125021 |
| 4302595 | 418 | 4.T.-; 76.GG.-T | 2.42205606 | 0.850176631 |
| 4275786 | 419 | 4.T.-; 87.-.T | 2.419947604 | 1.019110537 |
| 2650980 | 420 | 2.A.C; 0.T.-; 74.-.0 | 2.414107731 | 0.461696916 |
| 2458336 | 421 | 1.TA.--; 3.C.A; 76.G.- | 2.410845711 | 1.088632737 |
| 10284144 | 422 | 17.-.T; 76.G.- | 2.406246674 | 1.637908059 |
| 2726809 | 423 | 2.A.C; 0.T.-; 76.G.-; | 2.400026208 | 0.556489787 |
| | | 78.A.T | | |
| 2280896 | 424 | 0.T.-; 87.-.T | 2.398060925 | 0.559723653 |
| 2673790 | 425 | 2.A.C; 0.T.-; 88.G.- | 2.39801837 | 1.017283194 |
| 3188700 | 426 | 0.T.-; 2.A.G; 27.-.0 | 2.394340831 | 1.73237167 |
| 9632434 | 427 | 16.------------. | 2.393572747 | 1.140837334 |
| | | CTCATTACTTTG; | | |
| | | 75.-.G | | |
| 3029757 | 428 | 1.TA.--; 78.A.- | 2.391614326 | 0.52432112 |
| 2728393 | 429 | 2.A.C; 0.T.-; 76.GG.-T | 2.390176219 | 0.714223997 |
| 2300381 | 430 | 0.T.-; 75.CG.-T | 2.385232105 | 0.948093789 |
| 2279969 | 431 | 0.T.-; 86.C.- | 2.382152098 | 0.403913543 |
| 2260011 | 432 | 0.T.-; 77.-.0 | 2.379187705 | 0.60793876 |
| 2248579 | 433 | 0.T.-; 72.-.0 | 2.377033686 | 0.742558535 |
| 12075394 | 434 | 2.A.-; 55.-.G | 2.376878541 | 0.679081085 |
| 9602743 | 435 | 28.-.C; 76.GG.-C | 2.376348735 | 1.680837509 |
| 2736722 | 436 | 2.A.C; 0.T.-; 73.AT.-C | 2.374354239 | 1.104279695 |
| 12117240 | 437 | 2.A.-; 76.GG.-A | 2.372161723 | 0.428593735 |
| 10307397 | 438 | 17.-.T; 78.-.0 | 2.365042525 | 0.867959934 |
| 3034775 | 439 | 1.TA.--; 75.-.G | 2.359826914 | 0.99152259 |
| 12030812 | 440 | 2.A.-; 27.-.A | 2.355284207 | 1.651243725 |
| 10530683 | 441 | 15.-.T; 86.-.A | 2.354920575 | 0.999356279 |
| 12202799 | 442 | 2.A.-; 75.-.G | 2.352119205 | 0.508202346 |
| 9687168 | 443 | 28.-.T; 76.GG.-A | 2.350792044 | 1.612399102 |
| 4309853 | 444 | 4.T.-; 75.CG.-T | 2.344380848 | 0.844586894 |
| 4234320 | 445 | 4.T.-; 75.-.0 | 2.343966564 | 0.820229568 |
| 2698521 | 446 | 2.A.C; 0.T.-; 88.-.T | 2.33926209 | 0.684535077 |
| 2253698 | 447 | 0.T.-; 75.-.A | 2.33353651 | 0.918413016 |
| 2468003 | 448 | 1.TA.--; 3.C.A; 75.-.G | 2.329652898 | 0.934127399 |
| 12290253 | 449 | 2.A.-; 28.-.0 | 2.326187914 | 1.587751482 |
| 2999382 | 450 | 1.TA.--; 75.-.0 | 2.315411787 | 0.591810721 |
| 3227871 | 451 | 2.A.G; 0.T.-; 55.-.G | 2.313991155 | 0.774330181 |
| 10521017 | 452 | 15.-.T; 74.-.0 | 2.313768991 | 0.910046563 |
| 10089663 | 453 | 19.-.T; 75.-.G | 2.308273929 | 1.077849871 |
| 4274894 | 454 | 4.T.-; 87.-.G | 2.308046437 | 0.511567574 |
| 2466567 | 455 | 1.TA.--; 3.C.A; 78.A.- | 2.307828141 | 1.291273333 |
| 2696261 | 456 | 2.A.C; 0.T.-; 89.-.0 | 2.292578418 | 0.680820688 |
| 2675948 | 457 | 2.A.C; 0.T.-; 89.-.A | 2.289131671 | 1.259062601 |
| 10521784 | 458 | 15.-.T; 74.-.G | 2.282950048 | 0.904736128 |
| 12123787 | 459 | 2.A.-; 76.G.- | 2.27754961 | 0.49194122 |
| 10310335 | 460 | 17.-.T; 76.GG.-T | 2.27478155 | 0.80367504 |
| 2295876 | 461 | 0.T.-; 77.-.T | 2.273004186 | 0.931439741 |
| 2697871 | 462 | 0.T.-; 2.A.C; 89.-.T | 2.250463711 | 0.626247893 |
| 2735417 | 463 | 2.A.C; 0.T.-; 75.CG.-T | 2.249451799 | 0.389761214 |
| 2671836 | 464 | 0.T.-; 2.A.C; 86.-.A | 2.245473306 | 0.542416673 |
| 12033345 | 465 | 2.A.-; 27.-.C | 2.235034582 | 1.903166042 |

TABLE 5

| | SEQ | | | |
|---|---|---|---|---|
| | ID | | | |
| index | NO | muts_1indexed | MI | 95% CI |
| 2821484 | 466 | 0.T.-; 2.A.C; 17.-T. | 2.234604485 | 0.750279684 |
| 3033813 | 467 | 1.TA.--; 76.-.T | 2.229483844 | 0.547530348 |
| 2291551 | 468 | 0.T.-; 78.-.0 | 2.226391312 | 0.53155696 |
| 2716457 | 469 | 2.A.C; 0.T.-; 80.A.- | 2.212685904 | 0.548257242 |
| 2697599 | 470 | 2.A.C; 0.T.-; 89.A.- | 2.209480847 | 1.345862006 |
| 12135440 | 471 | 2.A.-; 87.-.A | 2.208341827 | 1.052844724 |
| 4273350 | 472 | 4.T.-; 88.-.T | 2.207860033 | 1.012912804 |
| 2298121 | 473 | 0.T.-; 75.-.G | 2.207579751 | 0.240933007 |
| 2652510 | 474 | 0.T.-; 2.A.C; 74.-.G | 2.206487468 | 0.612576212 |
| 3006640 | 475 | 1.TA.--; 86.-.0 | 2.206221139 | 0.584000131 |
| 10313388 | 476 | 17.-.T; 74.-.T | 2.206178293 | 1.036335839 |
| 10081410 | 477 | 19.-.T; 87.-.G | 2.205894948 | 0.589463833 |
| 3033236 | 478 | 1.TA.--; 76.GG.-T | 2.198134613 | 0.669434462 |
| 7242523 | 479 | 27.-.C86.-.0 | 2.198004115 | 1.972713412 |
| 7254383 | 480 | 27.-.C; 73.AT.-C | 2.19783418 | 1.510443212 |
| 2264531 | 481 | 0.T.-; 87.-.A | 2.197793214 | 0.777981784 |
| 2727301 | 482 | 0.T.-; 2.A.C; 77.-.T | 2.196877578 | 1.323161971 |
| 3019306 | 483 | 1.TA.--; 87.-.G | 2.191451738 | 0.53442114 |
| 4295725 | 484 | 4.T.-; 78.A.- | 2.187137221 | 0.609047392 |
| 10311816 | 485 | 17.-.T75.-.G | 2.187062055 | 1.506790657 |
| 12167745 | 486 | 2.A.-; 87.-.G | 2.184448369 | 0.736092188 |
| 12199256 | 487 | 2.A.-; 76.GG.-T | 2.178714409 | 0.736646546 |
| 6477911 | 488 | 16.-.C; 75.-.G | 2.177618084 | 0.983309644 |
| 4274124 | 489 | 4.T.-; 86.C.- | 2.17055291 | 0.474178023 |
| 12206105 | 490 | 2.A.-; 74.-.T | 2.170189846 | 0.60843597 |
| 12166825 | 491 | 2.A.-; 86.C.- | 2.167668003 | 0.773946533 |
| 11956698 | 492 | 2.AC.--; 43.C; 86.-.0 | 2.164335553 | 1.359888436 |
| 2280390 | 493 | 0.T.-; 87.-.G | 2.162228704 | 0.478769807 |
| 2650159 | 494 | 2.A.C; 0.T.-; 74.T. | 2.160583429 | 0.51707006 |
| 10531253 | 495 | 15.-.T; 87.-.A | 2.15924529 | 1.129639708 |
| 2665054 | 496 | 2.A.C; 0.T.-; 79.G.- | 2.157940781 | 0.562020183 |
| 8531520 | 497 | 75.-.G; 86.-.0 | 2.154823863 | 0.581992186 |
| 2296436 | 498 | 0.T.-; 76.GG.-T | 2.153923256 | 0.67936875 |
| 4249048 | 499 | 4.T.-; 86.-.0 | 2.142285584 | 0.675472603 |
| 10547068 | 500 | 15.-.T; 87.-.G | 2.139808506 | 0.856696675 |
| 12168820 | 501 | 2.A.-; 87.-.T | 2.139576287 | 0.458066181 |
| 2466824 | 502 | 1.TA.--; 3.C.A; 76.-.6 | 2.137393958 | 0.98855471 |
| 3036963 | 503 | 1.TA.--; 75.CG.-T | 2.136816031 | 0.479393618 |
| 10522450 | 504 | 15.-.T; 75.-.A | 2.134930675 | 1.003462809 |
| 10300736 | 505 | 17.-.T87.-.T | 2.134132228 | 1.348111441 |
| 3002220 | 506 | 1.TA.--; 79.G.- | 2.131038893 | 0.607179239 |
| 3030471 | 507 | 1.TA.--; 76.-.G | 2.129810368 | 0.371633581 |
| 10523429 | 508 | 15.-.T; 76.GG.-A | 2.129808628 | 0.787404871 |
| 1909254 | 509 | 0.TTA.---; 3.C.A; 75.-.G | 2.129733196 | 1.147227186 |
| 3004722 | 510 | 1.TA.--; 85.T.- | 2.123755125 | 1.091994071 |
| 2672731 | 511 | 2.A.C; 0.T.-; 87.-.A | 2.121163195 | 0.897965834 |
| 12129733 | 512 | 2.A.-; 77.GA.-- | 2.11956301 | 0.499892769 |
| 4250089 | 513 | 4.T.-; 89.-.A | 2.116592595 | 0.997715957 |
| 2688981 | 514 | 2.A.C; 0.T.-; 99.-.G | 2.112345173 | 0.980184341 |
| 2995452 | 515 | 1.TA.--; 74.-.G | 2.112014409 | 0.610553646 |
| 12114782 | 516 | 2.A.-; 75.-.A | 2.110203616 | 0.499880843 |
| 2993173 | 517 | 1.TA.--; 73.-.A | 2.10375793 | 0.696850789 |
| 1978344 | 518 | 0.T.C; 87.-.G | 2.100156515 | 0.870067465 |
| 4294004 | 519 | 4.T.-; 78.-.0 | 2.098823408 | 0.595418093 |
| 10568306 | 520 | 15.-.T; 73.A.- | 2.096194341 | 0.741080975 |
| 10561545 | 521 | 15.-.T; 76.GG.-T | 2.095379508 | 0.553757689 |
| 2713433 | 522 | 2.A.C; 0.T.-; 82.AA.-T | 2.094347694 | 0.559870514 |
| 1863579 | 523 | 0.TT.--; 75.-.G | 2.086195215 | 0.787239435 |
| 3006303 | 524 | 1.TA.--; 88.G.- | 2.086194701 | 0.536507797 |
| 4236935 | 525 | 4.T.-; 76.G.- | 2.081251549 | 0.919447585 |
| 12138801 | 526 | 2.A.-; 89.-.A | 2.079884636 | 1.115488685 |
| 12164760 | 527 | 2.A.-; 89.-.T | 2.079725529 | 0.315885203 |
| 10288787 | 528 | 17.-.T; 86.-.0 | 2.079540543 | 0.927030301 |
| 2664128 | 529 | 0.T.-2.A.C; 77.-.C | 2.079234701 | 0.378694546 |
| 2663861 | 530 | 0.T.-; 2.A.C; 76.G.-; | 2.077930225 | 0.700390601 |
| | | 78.A.C | | |
| 2726063 | 531 | 0.T.-; 2.A.C; 78.A.T | 2.077653454 | 0.972036971 |
| 4232837 | 532 | 4.T.-; 76.GG.-C | 2.068589675 | 0.579547915 |
| 3001194 | 533 | 1.TA.--; 77.-.A | 2.062571166 | 0.628957326 |
| 2048069 | 534 | 0.TT.--; 2.A.G; 76.G.- | 2.05862732 | 1.413051852 |
| 2653681 | 535 | 2.A.C; 0.T.-; 75.-.A | 2.051977832 | 0.427290312 |
| 2265126 | 536 | 0.T.-; 88.G.- | 2.050226061 | 0.556563218 |
| 2739399 | 537 | 0.T.-; 2.A.C; 73.A.G | 2.049449237 | 1.003306718 |
| 7250543 | 538 | 27.-.C; 78.-.C | 2.047334217 | 1.480241124 |
| 2747651 | 539 | 0.T.-; 2.A.C66.0 | 2.046981233 | 0.899726699 |
| 12437734 | 540 | 1.TAC.---; 78.A.- | 2.043018072 | 0.614544855 |
| 2826230 | 541 | 0.T.-; 2.A.C; 15.-.T | 2.041901776 | 0.537816622 |
| 2709008 | 542 | 2.A.C; 0.T.-; 82.A.-; | 2.036707329 | 1.246046649 |
| | | 84.A.T | | |
| 3005336 | 543 | 1.TA.--; 86.-.A | 2.034175728 | 0.483054171 |
| 4301274 | 544 | 4.T.-; 76.G.-; 78.A.T | 2.028068229 | 0.873353997 |
| 3018865 | 545 | 1.TA.--; 86.C.- | 2.024668973 | 0.616204139 |
| 2699310 | 546 | 2.A.C; 0.T.-; 86.0.- | 2.023086951 | 0.563791987 |
| 2279026 | 547 | 0.T.-; 89.A.- | 2.022323648 | 1.568173921 |
| 7248209 | 548 | 27.-.C; 82.A.- | 2.022242177 | 1.626724535 |
| 10562113 | 549 | 15.-.T; 76.-.T | 2.019995187 | 0.857776668 |
| 7181373 | 550 | 27.-.A; 76.G.- | 2.014441438 | 1.907810918 |
| 10559019 | 551 | 15.-.T; 76.-.G | 2.014069707 | 0.752817112 |
| 3018452 | 552 | 1.TA.--; 88.-.T | 2.012932283 | 0.626313379 |

TABLE 6

| | SEQ | | | |
|---|---|---|---|---|
| | ID | | | |
| index | NO | muts_1indexed | MI | 95% CI |
| 12118457 | 553 | 2.A.-; 76.-.A | 2.011043775 | 1.170428809 |
| 2805043 | 554 | 2.A.C; 0.T.-; 28.-.0 | 2.009926076 | 1.5236908 |
| 4242379 | 555 | 4.T.-; 77.GA.-- | 2.007947564 | 0.98469627 |
| 2259846 | 556 | 0.T.-; 76.6.-; 78.A.0 | 2.004816439 | 0.640251884 |
| 6462092 | 557 | 16.-.C; 87.-.A | 2.001230775 | 0.982714839 |
| 4312495 | 558 | 4.T.-; 73.AT.-G | 1.997381596 | 0.707994266 |
| 2668714 | 559 | 0.T.-; 2.A.C; 81.GA.-C | 1.996012534 | 0.678455572 |
| 2294477 | 560 | 0.T.-; 78.AG.-T | 1.993651117 | 0.703085174 |
| 12198135 | 561 | 2.A.-; 77.-.T | 1.993577573 | 1.432706828 |
| 4238150 | 562 | 4.T.-; 77.-.A | 1.992607238 | 0.761786326 |
| 3019738 | 563 | 1.TA.--; 87.-.T | 1.992446303 | 0.532459966 |
| 2352050 | 564 | 0.T.-; 17.-.T | 1.991048683 | 0.852386811 |
| 2705912 | 565 | 2.A.C; 0.T.-; 83.-.0 | 1.99036719 | 0.585299092 |
| 6478822 | 566 | 16.-.C; 74.-.T | 1.988911775 | 0.477065619 |
| 2665913 | 567 | 2.A.C; 0.T.-; 79.GA.-C | 1.9871574 | 1.186495063 |
| 3331447 | 568 | 2.A.G; 0.T.-; 76.GG.-T | 1.984971034 | 0.958178637 |
| 3186538 | 569 | 2.A.G; 0.T.-; 27.-.A | 1.983054551 | 1.530372349 |
| 2738784 | 570 | 2.A.C; 0.T.-; 73.AT.-G | 1.977333796 | 0.62344263 |
| 7832272 | 571 | 55.-.G | 1.976646956 | 0.881875422 |
| 4297458 | 572 | 4.T.-; 76.-.G | 1.976295522 | 0.996798704 |
| 3334291 | 573 | 2.A.G; 0.T.-; 75.-.G | 1.975325989 | 0.653653125 |
| 2212416 | 574 | 0.T.-; 27.-.0 | 1.973859043 | 1.457984475 |
| 8752897 | 575 | 55.-.T; 76.G.- | 1.971785265 | 0.46834501 |
| 2293333 | 576 | 0.T.-36.-.G | 1.970005749 | 0.514281315 |
| 7180386 | 577 | 27.-.A; 76.GG.-A | 1.969392489 | 1.667131306 |
| 2996180 | 578 | 1.TA.--; 75.-.A | 1.966703028 | 0.475623563 |
| 7238423 | 579 | 27.-.C; 74.T.- | 1.962642235 | 1.563372071 |
| 2261752 | 580 | 0.T.-; 77.GA.-- | 1.961634278 | 0.503084863 |
| 10282247 | 581 | 17.-.T; 76.GG.-C | 1.960039354 | 0.718769466 |
| 4230973 | 582 | 4.T.-; 76.GG.-A | 1.958471711 | 0.723493647 |
| 4276520 | 583 | 4.T.-; 86.-.G | 1.958025163 | 0.900653677 |
| 2675193 | 584 | 0.T.-; 2.A.C; 88.GA.-C | 1.956983044 | 0.878446278 |
| 13101476 | 585 | -1.GT.--; 75.-.G | 1.952447041 | 0.438583434 |
| 7203209 | 586 | 27.G.-76.GG.-C | 1.952129576 | 1.708559549 |
| 2724398 | 587 | 0.T.-; 2.A.C; 78.A.G | 1.947253829 | 0.801326607 |
| 10309365 | 588 | 17.-.T; 78.-.T | 1.946957778 | 1.542210263 |
| 10520418 | 589 | 15.-.T; 74.T.- | 1.944704908 | 0.727975608 |
| 10300394 | 590 | 17.-.T; 87.-.0 | 1.943744986 | 1.037237205 |
| 4248302 | 591 | 4.T.-; 88.G.- | 1.936753816 | 0.857321817 |
| 7240856 | 592 | 27.-.C; 76.G.-; 78.A.0 | 1.936751382 | 1.187952295 |
| 4313003 | 593 | 4.T.-; 73.A.G | 1.935442861 | 0.687757679 |
| 2467599 | 594 | 1.TA.--; 3.C.A; 76.GG.-T | 1.92287425 | 1.104512209 |
| 2279202 | 595 | 0.T.-; 89.-.T | 1.921076549 | 0.70944656 |
| 2259410 | 596 | 0.T.-; 77.-.A | 1.920454929 | 0.417160464 |
| 4305674 | 597 | 4.T.-; 75.-.G | 1.915266489 | 1.088551012 |
| 6459602 | 598 | 16.-.C; 76.G.- | 1.914798378 | 0.642358195 |
| 2701869 | 599 | 0.T.-; 2.A.C; 86.-.G | 1.914049421 | 0.477347775 |
| 2252978 | 600 | 0.T.-; 74.-.G | 1.911378422 | 0.602397906 |
| 6470049 | 601 | 16.-.C; 87.-.G | 1.910419486 | 0.714796483 |
| 12134362 | 602 | 2.A.-; 86.-.A | 1.906851105 | 0.661062722 |
| 12209524 | 603 | 2.A.-; 73.A.0 | 1.901209161 | 1.154288772 |
| 2260529 | 604 | 0.T.-; 79.G.- | 1.899530324 | 0.82876912 |
| 2690549 | 605 | 0.T.-; 2.A.C; 98.-.T | 1.898891625 | 0.95407757 |
| 10073100 | 606 | 19.-.T; 88.G.- | 1.89794244 | 0.781693777 |
| 4239969 | 607 | 4.T.-; 79.G.- | 1.897769811 | 0.794035202 |
| 3026047 | 608 | 1.TA.--; 81.GA.-T | 1.896236907 | 0.554505707 |
| 3003294 | 609 | 1.TA.--; 77.GA.-- | 1.895773589 | 0.506363603 |
| 12121216 | 610 | 2.A.-; 75.-.0 | 1.895093657 | 0.610069511 |
| 2696635 | 611 | 0.T.-; 2.A.C; 89.AT.-G | 1.893880561 | 0.881556619 |
| 12130978 | 612 | 2.A.-; 81.GA.-C | 1.891473979 | 0.935650632 |
| 6475473 | 613 | 16.-.C; 78.A.- | 1.888788297 | 0.580982578 |
| 1853356 | 614 | 0.TT.--; 76.G.- | 1.884632638 | 0.80171104 |
| 8544082 | 615 | 75.-.G; 87.-.G | 1.884341912 | 0.535653292 |
| 2884429 | 616 | 1.-.C; 76.6.- | 1.883538595 | 0.673377662 |
| 6368955 | 617 | 17.-.A; 76.-.G | 1.882010313 | 0.843102729 |
| 2746170 | 618 | 2.A.C; 0.T.-; 66.CT.-G | 1.87989538 | 0.516685509 |
| 4226314 | 619 | 4.T.-; 74.-.0 | 1.873701307 | 0.901044909 |
| 6304607 | 620 | 16.-.A; 76.G.- | 1.873365067 | 0.522811196 |
| 2583788 | 621 | 0.T.-; 2.A.C; 27.G.- | 1.873101254 | 1.38825951 |
| 2255694 | 622 | 0.T.-; 76.-.A | 1.869207789 | 0.836610884 |
| 7249882 | 623 | 27.-.C; 80.A.- | 1.867026014 | 1.645069173 |
| 10069481 | 624 | 19.-.T; 75.-.0 | 1.864128274 | 0.644689284 |
| 2643173 | 625 | 0.T.-; 2.A.C; 70.T.- | 1.863776691 | 1.688937677 |
| 12749699 | 626 | 0.-.T; 75.-.G | 1.863460232 | 0.756791498 |
| 7208859 | 627 | 27.G.-; 87.-.G | 1.861951751 | 1.68656168 |
| 4271233 | 628 | 4.T.-; 89.-.0 | 1.854344144 | 0.839274714 |
| 6455215 | 629 | 16.-.C; 73.-.A | 1.850284678 | 0.825458676 |
| 2816525 | 630 | 0.T.-; 2.A.C; 19.-.T | 1.847987652 | 0.368770724 |
| 2292594 | 631 | 0.T.-; 78.A.- | 1.846146605 | 0.312862911 |
| 2287708 | 632 | 0.T.-; 82.AA.-T | 1.845505779 | 0.408363625 |
| 2721779 | 633 | 2.A.C; 0.T.-; 78.A.- | 1.842043235 | 0.676554896 |
| 1945942 | 634 | 0.TT.--; 2.A.C; 75.-.G | 1.841650114 | 1.270815664 |
| 12111705 | 635 | 2.A.-; 74.-.0 | 1.840532416 | 0.668977898 |

TABLE 7

| | SEQ | | | |
|---|---|---|---|---|
| index | ID NO | muts_1indexed | MI | 95% CI |
| 2567750 | 636 | 0.T.-; 2.A.C; 16.-.0 | 1.8403251 | 0.426712425 |
| 2463364 | 637 | 1.TA.--; 3.C.A; 87.-.G | 1.839213942 | 0.821355081 |
| 3031594 | 638 | 1.TA.--; 78.AG.-T | 1.838954225 | 0.619562955 |
| 10199376 | 639 | 18.-.G; 75.-.G | 1.837121283 | 1.238162985 |
| 4272444 | 640 | 4.T.-; 89.A.- | 1.836884745 | 0.9982317 |
| 9610551 | 641 | 28.-.C; 78.A.- | 1.835988851 | 1.801689999 |
| 2737747 | 642 | 0.T.-; 2.A.C; 73.A.0 | 1.832606597 | 1.293143415 |
| 12113430 | 643 | 2.A.-; 74.-.G | 1.828115917 | 0.752764013 |
| 10530413 | 644 | 15.-.T; 85.TC.-G | 1.825064554 | 1.155205145 |
| 12176759 | 645 | 2.A.-; 83.-.T | 1.824304802 | 1.045532305 |
| 12127185 | 646 | 2.A.-79.0.- | 1.824126309 | 0.605894284 |
| 4288099 | 647 | 4.T.-; 81.GA.-T | 1.823734764 | 0.75329209 |
| 12196850 | 648 | 2.A.-; 78.A.T | 1.82118191 | 1.085783969 |
| 6457366 | 649 | 16.-.C; 75.-.A | 1.820899999 | 0.638027421 |
| 12105140 | 650 | 2.A.-; 72.-.0 | 1.818449485 | 0.69990752 |
| 1944577 | 651 | 0.TT.--; 2.A.C; 78.A.- | 1.816800398 | 1.169943299 |
| 4293546 | 652 | 4.T.-; 78.AG.-C | 1.815616502 | 1.015355487 |
| 9996838 | 653 | 19.-.G; 74.-.T | 1.814174099 | 0.799877397 |
| 10301024 | 654 | 17.-.T; 86.-.G | 1.813594662 | 0.966656071 |
| 2308228 | 655 | 0.T.-; 66.C.- | 1.811408251 | 0.755819624 |
| 7835938 | 656 | 55.-.G; 75.-.G | 1.811344956 | 1.11212595 |
| 3005841 | 657 | 1.TA.--; 87.-.A | 1.810592015 | 0.805934793 |
| 12169698 | 658 | 2.A.-; 86.-.G | 1.807867405 | 0.857412996 |
| 3028597 | 659 | 1.TA.--; 78.AG.-C | 1.802701874 | 0.743214495 |
| 7191855 | 660 | 27.-.A; 75.CG.-T | 1.802109849 | 1.429792639 |
| 9972503 | 661 | 19.-.G; 74.T.- | 1.801952299 | 0.749871626 |
| 4026979 | 662 | 3.-.C; 75.-.G | 1.801908368 | 1.374192028 |
| 7180118 | 663 | 27.-.A; 75.-.A | 1.801182739 | 1.524863174 |
| 10081203 | 664 | 19.-.T; 86.C.- | 1.799229513 | 0.502156779 |
| 10532156 | 665 | 15.-.T; 86.-.0 | 1.796941605 | 1.070232668 |
| 2749667 | 666 | 2.A.C; 0.T.-; 65.GC.-T | 1.795230574 | 0.641741966 |
| 12139228 | 667 | 2.A.-; 90.-.0 | 1.793917598 | 1.201242724 |
| 10288547 | 668 | 17.-.T; 88.G.- | 1.793873519 | 1.192733019 |
| 4331367 | 669 | 4.T.-; 55.-.T | 1.792669241 | 0.481210459 |
| 2725463 | 670 | 2.A.C; 0.T.-; 78.-.T | 1.79217915 | 0.507302457 |
| 2718857 | 671 | 0.T.-; 2.A.C; 79.GA.-T | 1.791913163 | 0.899839665 |
| 2247247 | 672 | 0.T.-; 72.-.A | 1.791822909 | 0.887353696 |
| 12125011 | 673 | 2.A.-; 77.-.A | 1.786430219 | 0.527171387 |
| 4225246 | 674 | 4.T.-; 74.T.- | 1.786417427 | 0.629044775 |
| 12165722 | 675 | 2.A.-; 88.-.T | 1.786308399 | 1.272797742 |
| 2733129 | 676 | 0.T.-; 2.A.C; 75.C.- | 1.785722582 | 0.560847969 |
| 2469676 | 677 | 1.TA.--; 3.C.A; 73.A.- | 1.785269687 | 1.17402736 |
| 3018172 | 678 | 1.TA.--; 89.-.T | 1.784650459 | 0.75738752 |
| 12196049 | 679 | 2.A.-; 78.-.T | 1.782353237 | 0.753905536 |
| 9612063 | 680 | 28.-.C; 74.-.T | 1.782091765 | 1.617793957 |
| 10547909 | 681 | 15.-.T86.-.G | 1.781475153 | 0.81786269 |
| 12194342 | 682 | 2.A.-; 78.A.-; 80.A.- | 1.77971829 | 1.288558347 |
| 4228855 | 683 | 4.T.-; 75.-.A | 1.775913052 | 0.896674597 |
| 10546613 | 684 | 15.-.T; 86.C.- | 1.775790253 | 0.858668751 |
| 10547538 | 685 | 15.-.T; 87.-.T | 1.771955914 | 1.080256702 |
| 10519772 | 686 | 15.-.T; 73.-.A | 1.770892898 | 0.624353321 |
| 8510297 | 687 | 77.G.T | 1.76973633 | 1.238813589 |
| 12119606 | 688 | 2.A.-; 76.GG.-C | 1.768206821 | 1.109938596 |
| 2669299 | 689 | 0.T.-; 2.A.C; 85.TC.-A | 1.766862971 | 0.841676179 |
| 6469807 | 690 | 16.-.C; 86.C.- | 1.764660394 | 0.758824717 |
| 10197299 | 691 | 18.-.G; 76.-.G | 1.763760462 | 0.832130059 |
| 3344225 | 692 | 2.A.G; 0.T.-; 73.A.- | 1.76219764 | 1.216224489 |
| 2456917 | 693 | 1.TA.--; 3.C.A; 75.-.A | 1.760739771 | 1.203417145 |
| 10307233 | 694 | 17.-.T; 78.AG.-C | 1.760381908 | 1.100594294 |
| 12314352 | 695 | 2.A.-; 15.-.T | 1.758187872 | 0.435582357 |
| 12177388 | 696 | 2.A.-; 82.AA.-- | 1.750995276 | 0.61463172 |
| 2694455 | 697 | 0.T.-; 2.A.C; 91.A.-; | 1.750810727 | 1.014669774 |
| | | 93.A.G | | |
| 3040066 | 698 | 1.TA.--; 73.A.- | 1.750348973 | 0.689636186 |
| 10081633 | 699 | 19.-.T87.-.T | 1.749883408 | 0.917269067 |
| 4246508 | 700 | 4.T.-; 86.-.A | 1.748983402 | 0.938986874 |
| 4301580 | 701 | 4.T.-; 77.-.T | 1.743946631 | 0.701295877 |
| 10181172 | 702 | 18.-.G; 75.-.A | 1.743101698 | 1.01566765 |
| 12200668 | 703 | 2.A.-; 76.-.T | 1.740748942 | 0.87292689 |
| 10524336 | 704 | 15.-.T; 76.GG.-C | 1.738223203 | 0.390480555 |
| 3007212 | 705 | 1.TA.--; 89.-.A | 1.737858461 | 1.071814108 |
| 10526271 | 706 | 15.-.T; 76.G.- | 1.737620179 | 1.09826626 |
| 10561166 | 707 | 15.-.T; 77.-.T | 1.736588831 | 0.744748617 |
| 2663037 | 708 | 2.A.C; 0.T.-; 77.-.A | 1.731783986 | 0.417310116 |
| 12136525 | 709 | 2.A.-; 88.G.- | 1.731312294 | 0.57794653 |
| 8758832 | 710 | 55.-.T; 78.A.- | 1.730884483 | 0.640655822 |
| 1864295 | 711 | 0.TT.--; 75.CG.-T | 1.7286748 | 0.424298588 |
| 10550736 | 712 | 15.-.T; 82.A.-; 84.A.G | 1.728100107 | 0.887580069 |
| 2657071 | 713 | 2.A.C; 0.T.-; 76.-.A | 1.727660257 | 1.206003654 |
| 2059338 | 714 | 0.TT.--; 2.A.G; 75.-.G | 1.725033887 | 1.054075378 |
| 12182224 | 715 | 2.A.-; 82.AA.-T | 1.721741871 | 0.598515022 |
| 2671130 | 716 | 2.A.C; 0.T.-; 85.TC.-G | 1.721255074 | 0.884259809 |
| 4200182 | 717 | 4.T.-; 55.-.G | 1.721190019 | 1.232924607 |
| 2281298 | 718 | 0.T.-; 86.-.G | 1.720150085 | 0.459949896 |

TABLE 8

| | SEQ | | | |
|---|---|---|---|---|
| index | ID NO | muts_1indexed | MI | 95% CI |
| 7182097 | 719 | 27.-.A; 77.GA.-- | 1.718675301 | 1.318350535 |
| 2251662 | 720 | 0.T.-; 74.T.- | 1.718536267 | 0.428185144 |
| 1904870 | 721 | 0.TTA.---; 3.C.A; | 1.715468512 | 1.34467556 |
| | | 76.G.- | | |
| 10553996 | 722 | 15.-.T; 81.GA.-T | 1.71542255 | 0.963037099 |
| 10202590 | 723 | 18.-.G; 73.A.- | 1.715117267 | 0.822174045 |
| 3028839 | 724 | 1.TA.--; 78.-.C | 1.712954587 | 0.450495404 |
| 3304552 | 725 | 0.T.-; 2.A.G; | 1.712919885 | 0.767193507 |
| | | 89.-.T | | |
| 4247308 | 726 | 4.T.-; 87.-.A | 1.711145921 | 0.765770921 |
| 4318521 | 727 | 4.T.-; 66.CT.-G | 1.710421741 | 0.956759562 |
| 7247759 | 728 | 27.-.C; 86.-.G | 1.709588646 | 1.198020951 |
| 10198320 | 729 | 18.-.G; 76.GG.-T | 1.709356476 | 0.700624761 |
| 2457655 | 730 | 1.TA.--; 3.C.A; | 1.709355062 | 1.259561047 |
| | | 76.GG.-C | | |
| 3032520 | 731 | 1.TA.--; 76.G.-; | 1.709186022 | 0.754280463 |
| | | 78.A.T | | |
| 2702792 | 732 | 0.T.-; 2.A.C; | 1.70908021 | 0.741854781 |
| | | 86.CC.-T | | |
| 12171374 | 733 | 2.A.-; 84.AT.-- | 1.708956084 | 1.239010302 |
| 10192666 | 734 | 18.-.G; 87.-.G | 1.706139319 | 0.672236416 |
| 2642318 | 735 | 2.A.C; 0.T.-; | 1.703389866 | 0.651239291 |
| | | 72.-.A | | |
| 2718074 | 736 | 2.A.C; 0.T.-; | 1.699976056 | 1.191093731 |
| | | 77.GA.--; 82.A.T | | |
| 12191670 | 737 | 2.A.-; 78.A.- | 1.696728454 | 0.819298298 |
| 2456219 | 738 | 1.TA.--; 3.C.A; | 1.696442704 | 1.260292211 |
| | | 74.T.- | | |
| 2457365 | 739 | 1.TA.--; 3.C.A; | 1.694881811 | 0.951237077 |
| | | 76.GG.-A | | |
| 8538180 | 740 | 75.-.G | 1.694861152 | 0.415924921 |
| 3020581 | 741 | 1.TA.--; | 1.692620071 | 1.160105308 |
| | | 86.CC.-T | | |
| 10281916 | 742 | 17.-.T; 76.-.A | 1.692603642 | 0.648841391 |
| 2707684 | 743 | 0.T.-; 2.A.C; | 1.691822732 | 1.346496086 |
| | | 82.A.-; 84.A.G | | |
| 2676761 | 744 | 0.T.-; 2.A.C; | 1.68930292 | 0.99991905 |
| | | 90.-.G | | |
| 7213979 | 745 | 27.G.-; 75.CG.-T | 1.688772312 | 1.195343004 |
| 2459101 | 746 | 1.TA.--; 3.C.A; | 1.686519606 | 0.966564286 |
| | | 77.GA-- | | |
| 8123571 | 747 | 75.-C; 86.-.C | 1.685647367 | 0.454380756 |
| 12207287 | 748 | 2.A.-; 75.CG.-T | 1.685305192 | 0.563871209 |
| 2740245 | 749 | 2.A.C; 0.T.-; | 1.684914398 | 1.012999566 |
| | | 70.-.T | | |
| 10531744 | 750 | 15.-.T; 88.G.- | 1.684556387 | 1.172453501 |
| 2669798 | 751 | 2.A.C; 0.T.-; | 1.683775918 | 0.485672655 |
| | | 82.-.A | | |
| 2294771 | 752 | 0.T.-; 78.-.T | 1.683554242 | 0.365785232 |
| 7213033 | 753 | 27.G.-; 76.GG.-T | 1.681704475 | 1.553533309 |
| 7829581 | 754 | 55.-.G; 76.G.- | 1.681581148 | 1.157922781 |
| 2808092 | 755 | 0.T.-; 2.A.C; | 1.680339253 | 1.570645735 |
| | | 28.-.T | | |
| 2960043 | 756 | 1.TA.--; 27.-.C | 1.675962289 | 1.352861328 |
| 10506564 | 757 | 15.-.T; 55.-.G | 1.675003018 | 1.443016487 |
| 4315349 | 758 | 4.T.-; 73.A.T | 1.667757548 | 0.705372587 |
| 2705067 | 759 | 2.A.C; 0.T.-; | 1.667686194 | 0.498039786 |
| | | 82.A.- | | |
| 3330280 | 760 | 0.T.-; 2.A.G; | 1.666946086 | 0.947896566 |
| | | 76.G.-; 78.A .T | | |
| 9630969 | 761 | 16.------------ . | 1.664680451 | 1.315435632 |
| | | CTCATTACTTTG; | | |
| | | 75.-.A | | |
| 12173513 | 762 | 2.A.-; 82.A.- | 1.663830201 | 0.733539657 |
| 3280346 | 763 | 0.T.-; 2.A.G; | 1.662631303 | 1.204381863 |
| | | 87.-.A | | |
| 7238549 | 764 | 27.-.C; 74.-.C | 1.661306709 | 1.214766158 |
| 8154695 | 765 | 76.G.-; 78.A.C | 1.661229303 | 0.368056731 |
| 10516784 | 766 | 15.-.T; 72.-.A | 1.66016215 | 0.597302394 |
| 10307953 | 767 | 17.-.T; 78.A.- | 1.65952488 | 0.82365406 |
| 12432835 | 768 | 1.TAC.---; 75.-.C | 1.654476204 | 0.813686317 |
| 12193344 | 769 | 2.A.-; 76.-.G | 1.653563552 | 0.663784021 |
| 2297191 | 770 | 0.T.-; 76.-.T | 1.652000897 | 0.458064366 |
| 2126158 | 771 | 0.TTA.---; | 1.649649089 | 1.318355451 |
| | | 3.C.G; 87.-G | | |
| 2283617 | 772 | 0.T.-; 83.-.C | 1.648963324 | 1.421238851 |
| 2654520 | 773 | 2.A.C; 0.T.-; | 1.647087379 | 0.573966628 |
| | | 75.CG.-A | | |
| 3332543 | 774 | 0.T.-; 2.A.G; | 1.644966768 | 0.844422969 |
| | | 76.-.T | | |
| 9604425 | 775 | 28.-.C88.G.- | 1.6439264 | 1.218234779 |
| 12109255 | 776 | 2.A.-; 73.-.A | 1.643507554 | 0.929692908 |
| 12438229 | 777 | 1.TAC.---; | 1.641912193 | 0.689368529 |
| | | 76.GG.-T | | |
| 8153054 | 778 | 77.G.C | 1.64142005 | 1.384906369 |
| 10308482 | 779 | 17.-.T; 76.-.G | 1.641323583 | 1.127042919 |
| 10300026 | 780 | 17.-.T; 86.C.- | 1.641224613 | 1.227957862 |
| 2715234 | 781 | 2.A.C; 0.T.-; | 1.640370122 | 1.47602933 |
| | | 80.AG.-C | | |
| 10532541 | 782 | 15.-.T; 90.T.- | 1.640240149 | 1.020337794 |
| 12721860 | 783 | 0.-.T; 76.G.- | 1.639509598 | 0.366635004 |
| 2460008 | 784 | 1.TA.--; 3.C.A; | 1.639261031 | 0.936045278 |
| | | 86.-.C | | |
| 2264044 | 785 | 0.T.-; 86.-.A | 1.639121471 | 0.511832699 |
| 12188811 | 786 | 2.A.-; 78.AG.-C | 1.637960122 | 0.77568855 |
| 12432569 | 787 | 1.TAC.---; | 1.637292013 | 0.882764983 |
| | | 76.GG.-A | | |
| 9602947 | 788 | 28.-.C; 75.-.C | 1.636117538 | 1.557596786 |
| 2994003 | 789 | 1.TA.--; 74. T.- | 1.633550393 | 0.541929003 |
| 12213405 | 790 | 2.A.-; 73.A.- | 1.63354167 | 0.735980135 |
| 2719575 | 791 | 0.T.-; 2.A.C; | 1.633437814 | 0.44613275 |
| | | 78.AG.-C | | |
| 2123173 | 792 | 0.TTA.---; 3.C.G; | 1.632290442 | 1.510924178 |
| | | 76.G.- | | |
| 10086342 | 793 | 19.-.T; 78.-.C | 1.630575414 | 0.477336939 |
| 12236371 | 794 | 2.A.-; 55.-.T | 1.629793154 | 0.850354697 |
| 6473588 | 795 | 16.-.C; 81.GA.-T | 1.6283178 | 0.397977937 |
| 7240999 | 796 | 27.-.C; 79.G.- | 1.627916832 | 1.310172414 |
| 12189370 | 797 | 2.A.-; 78.-.C | 1.625186884 | 0.714620198 |
| 3005003 | 798 | 1.TA.--; 85.TC.-G | 1.624844672 | 0.819992466 |
| 10185851 | 799 | 18.-.G; 86.-.C | 1.622189588 | 0.720091613 |
| 2725020 | 800 | 0.T.-; 2.A.C; | 1.621816405 | 0.69613073 |
| | | 78.AG.-T | | |

TABLE 9

| | SEQ ID | | | |
|---|---|---|---|---|
| index | NO | muts_1indexed | MI | 95% CI |
| 12212274 | 801 | 2.A.-; 70.-.T | 1.620710424 | 1.038198418 |
| 8470264 | 802 | 78.-.C | 1.617470851 | 0.271680388 |
| 2286841 | 803 | 0.T.-; 82.AA.-G | 1.617088496 | 0.606230824 |
| 7241506 | 804 | 27.-.C; 81.GA.-C | 1.616908898 | 1.111991942 |
| 12163987 | 805 | 2.A.-; 89.A.G | 1.616843955 | 0.718476436 |
| 3364655 | 806 | 0.T.-; 2.A.G; | 1.615459441 | 1.131392113 |
| | | 55.-.T | | |
| 1904677 | 807 | 0.TTA.---; 3.C.A; | 1.613614518 | 0.965094427 |
| | | 75.-.C | | |
| 2712438 | 808 | 2.A.C; 0.T.-; 82.-.T | 1.61208488 | 0.769494423 |
| 14645004 | 809 | -29.A.C; 0.T.-; | 1.610092293 | 0.432743672 |
| | | 2.A.C; 76.G.- | | |
| 10322550 | 810 | 17.-.T; 55.-.T | 1.608294231 | 0.835345091 |
| 10304965 | 811 | 17.-.T; 82.AA.-T | 1.605684059 | 1.005872373 |
| 10279228 | 812 | 17.-.T; 74.-.C | 1.603403686 | 0.964621553 |
| 3263089 | 813 | 2.A.G; 0.T.-; | 1.603002415 | 0.944419565 |
| | | 74.-.G | | |
| 2282393 | 814 | 0.T.-; 82.A.-; | 1.601545542 | 1.047011173 |
| | | 85.T.G | | |
| 2463251 | 815 | 1.TA .--; 3.C.A; | 1.597766756 | 0.958863507 |
| | | 86.C.- | | |
| 2459897 | 816 | 1.TA .--; | 1.595799757 | 0.724801659 |
| | | 3.C.A; 88.G.- | | |
| 1852430 | 817 | 0.TT.--; 76.GG.-A | 1.595672352 | 0.848408617 |
| 10305251 | 818 | 17.-.T; 81.GA.-T | 1.593404575 | 1.07855471 |
| 9603994 | 819 | 28.-.C; 85.TC.-A | 1.593398609 | 1.338922574 |
| 4319798 | 820 | 4.T.-; 66.CT.-- | 1.5927753 | 0.719209709 |
| 3042484 | 821 | 1 .TA.--; 66.CT.-G | 1.592062494 | 0.578104998 |
| 8544184 | 822 | 75.-.G; 87.-.T | 1.591574219 | 0.630898033 |
| 2709867 | 823 | 2.A.C; 0.T.-; | 1.590223625 | 0.505705027 |
| | | 82.AA.-C | | |
| 3439310 | 824 | 0.T.-; 2.A.G; | 1.589266839 | 0.341479677 |
| | | 15.-.T | | |
| 2718364 | 825 | 0.T.-; 2.A.C; | 1.587566696 | 1.149184797 |
| | | 80.A.T | | |
| 4223967 | 826 | 4.T.-; 73.-.A | 1.587282349 | 0.645700343 |
| 4271617 | 827 | 4.T.-; 89.AT.-G | 1.587137334 | 1.233444621 |
| 10460510 | 828 | 16.C.-; 76.GG.-A | 1.586590153 | 0.787644542 |
| 4227764 | 829 | 4.T.-; 74.-.G | 1.585660861 | 0.680124313 |
| 9994855 | 830 | 19.-.G; 76.GG.-T | 1.58530649 | 0.779320174 |
| 3272821 | 831 | 2.A.G; 0.T.-; | 1.583120825 | 0.912440621 |
| | | 76.G.-; 78.A.C | | |
| 12110798 | 832 | 2.A.-; 74.T.- | 1.581717864 | 0.658647546 |
| 1975319 | 833 | 0.T.C; 76.G.- | 1.58114814 | 0.609951036 |
| 10316332 | 834 | 17.-.T; 73.A.- | 1.580871543 | 0.902426494 |
| 2720616 | 835 | 0.T.-; 2.A.C; | 1.58077409 | 0.565168836 |
| | | 78.A.C | | |
| 8753785 | 836 | 55.-.T; 86.-.C | 1.580570661 | 0.907594533 |
| 8112378 | 837 | 76.-.A | 1.579846517 | 0.965148419 |
| 2819005 | 838 | 0.T.-; 2.A.C; | 1.579281152 | 0.490774802 |
| | | 18.-.G | | |
| 8357828 | 839 | 87.-.G | 1.578903423 | 0.260894611 |
| 6477023 | 840 | 16.-.C; 76.GG.-T | 1.577281377 | 0.801993714 |
| 12737747 | 841 | 0.-.T; 87.-.G | 1.576853785 | 0.587015792 |
| 12309294 | 842 | 2.A.-; 17.-.T | 1.575651742 | 0.644197096 |
| 2252133 | 843 | 0.T.-; 74.-.C | 1.575512867 | 0.340117554 |
| 10567192 | 844 | 15.-.T; 73.AT.-G | 1.575291887 | 0.657147067 |
| 3261438 | 845 | 2.A.G; 0.T.-; 74.-.C | 1.574575619 | 0.783331617 |
| 15169229 | 846 | -29.A.G; 75.-.G | 1.574259504 | 0.382115947 |
| 6128804 | 847 | 14.-.A; | 1.573502126 | 0.97997063 |
| | | 76.GG.-T | | |
| 12197720 | 848 | 2.A.-; 76.G.-; | 1.57327628 | 0.892867309 |
| | | 78.A.T | | |
| 3326919 | 849 | 2.A.G; 0.T.-; | 1.572520314 | 0.782894375 |
| | | 76.-.G | | |
| 12164376 | 850 | 2.A.-; 89.A.- | 1.571939028 | 1.399860294 |
| 2990209 | 851 | 1.TA.--; 70.T.- | 1.571341225 | 1.473641775 |
| 8538220 | 852 | 75.-.G; 132.G.T | 1.5708167 | 0.464722537 |
| 10068467 | 853 | 19.-.T; 76.GG.-A | 1.570115611 | 0.903671278 |
| 9697533 | 854 | 28.-.T; 75.CG.-T | 1.568984808 | 1.329590045 |
| 2958993 | 855 | 1.TA.--; 27.-.A | 1.567973804 | 1.255119149 |
| 3001629 | 856 | 1 .TA.--; 76.G.-; | 1.566060562 | 0.524342191 |
| | | 78.A.C | | |
| 4291732 | 857 | 4.T.-; 77.GA.--; | 1.564592325 | 1.309941389 |
| | | 82.A.T | | |
| 4238868 | 858 | 4.T.-; 76.G.-; | 1.56447294 | 0.829602825 |
| | | 78.A.C | | |
| 3306461 | 859 | 0.T.-; 2.A.G; | 1.563833782 | 0.717413376 |
| | | 87.-.G | | |
| 1937976 | 860 | 2.A.C; 0.TT.--; | 1.560038457 | 1.462696008 |
| | | 76.G.- | | |
| 4172716 | 861 | 4.T.-; 27.-.C | 1.558070079 | 1.387693861 |
| 12185288 | 862 | 2.A.-; 80.A.- | 1.557024858 | 0.705941145 |
| 14813579 | 863 | -29.A.C; 75.-.G | 1.556839809 | 0.414912384 |
| 2468675 | 864 | 1.TA.--; 3.C.A; | 1.553046656 | 0.931035197 |
| | | 75.CG.-T | | |
| 12195510 | 865 | 2.A.-; 78.AG.-T | 1.55000419 | 0.886783857 |
| 4285997 | 866 | 4.T.-; 82.AA.-G | 1.549250991 | 0.782347429 |
| 3275841 | 867 | 2.A.G; 0.T.-; | 1.549221581 | 0.526146695 |
| | | 77.GA.-- | | |
| 3018032 | 868 | 1.TA.--; 89.A.- | 1.549009371 | 1.113927175 |
| 2301817 | 869 | 0.T.-; 73.A.C | 1.54864254 | 0.917412432 |
| 3305057 | 870 | 0.T.-; 2.A.G; 88.-.T | 1.547965444 | 0.420214747 |
| 2122618 | 871 | 0.TTA.---; 3.C.G; | 1.547889984 | 1.094378143 |
| | | 76.GG.-A | | |
| 2289325 | 872 | 0.T.-; 80.A.- | 1.547099084 | 0.393404706 |
| 4291562 | 873 | 4.T.-; 80.AG.-T | 1.546888356 | 1.017074272 |
| 10557226 | 874 | 15.-.T; 78.-.C | 1.544857428 | 0.974814633 |
| 12748115 | 875 | 0.-.T; 76.GG -T | 1.544686324 | 0.709928076 |
| 3026518 | 876 | 1.TA.--; 80.AG.-C | 1.544042546 | 1.240581963 |
| 10545028 | 877 | 15.-.T; 89.-.C | 1.542272906 | 0.579291446 |
| 3416823 | 878 | 0.T.-; 2.A.G; 28.-.C | 1.53913175 | 1.436213329 |
| 9976094 | 879 | 19.-.G; 76.G.- | 1.538689261 | 0.748851507 |
| 1852751 | 880 | 0.TT.--; 76.GG.-C | 1.536921551 | 0.769662735 |
| 4314686 | 881 | 4.T.-; 73.A.- | 1.536187783 | 1.014477961 |

TABLE 10

| | SEQ ID | | | |
|---|---|---|---|---|
| index | NO | muts_1indexed | MI | 95% CI |
| 6470272 | 882 | 16.-.C; 87.-.T | 1.535725631 | 0.59665986 |
| 2673006 | 883 | 0.T.-; 2.A.C; | 1.535462742 | 0.804157995 |
| | | 87.C.A | | |
| 12137377 | 884 | 2.A.-; 86.-.C | 1.535147851 | 0.546194055 |
| 12184036 | 885 | 2.A.-; 80.AG.-C | 1.531564715 | 1.351567783 |
| 10285242 | 886 | 17.-.T; 77.-.C | 1.53026457 | 1.164347551 |
| 2263017 | 887 | 0.T.-; 82.-.A | 1.529811403 | 0.467986989 |
| 12163286 | 888 | 2.A.-; 89.AT.-G | 1.528822089 | 1.00107691 |
| 2706481 | 889 | 2.A.C; 0.T.-; | 1.52754828 | 1.209383598 |
| | | 82.A.-; 84.A.C | | |
| 4320578 | 890 | 4.T.-; 66.C.- | 1.527179936 | 0.994611388 |
| 3004121 | 891 | 1.TA.--; 85.TC.-A | 1.525870388 | 0.697533949 |
| 3269260 | 892 | 2.A.G; 0.T.-; 75.-.C | 1.521722305 | 0.738666566 |
| 7835518 | 893 | 55.-.G; 76.-.G | 1.518881805 | 0.935071683 |
| 10195401 | 894 | 18.-.G; 81.GA.-T | 1.518543539 | 0.775808631 |
| 6477333 | 895 | 16.-.C; 76.-.T | 1.51587769 | 0.626814313 |
| 4171307 | 896 | 4.T.-; 27.-.A | 1.513605325 | 1.233769066 |
| 10299590 | 897 | 17.-.T; 88.-.T | 1.513069933 | 1.295754832 |
| 6478447 | 898 | 16.-.C; 75.C.- | 1.512491339 | 0.508038646 |
| 4249490 | 899 | 4.T.-; 88.GA.-C | 1.512130404 | 0.73669735 |
| 12220656 | 900 | 2.A.-; 66.C.- | 1.512020037 | 1.05546421 |
| 7240739 | 901 | 27.-.C; 77.-.A | 1.511778431 | 1.177553371 |
| 10315246 | 902 | 17.-.T; 73.AT.-G | 1.511330905 | 1.009774993 |
| 1944754 | 903 | 0TT.--; 2.A.C; | 1.511225805 | 1.155505022 |
| | | 76.-.G | | |
| 3337255 | 904 | 2.A.G; 0.T.-; 74.-.T | 1.509602507 | 0.678006083 |
| 6362999 | 905 | 17.-.A; 76.G.- | 1.508590435 | 1.042551324 |
| 3017407 | 906 | 1.TA.--; 89.-.C | 1.508577828 | 0.465448085 |
| 9973601 | 907 | 19.-.G; 75.-.A | 1.502907348 | 0.893737423 |
| 12186826 | 908 | 2.A.-; 80.AG.-T | 1.500547059 | 0.812595989 |
| 3035711 | 909 | 1.TA.--; 75.C.- | 1.50008318 | 0.591995026 |
| 8526584 | 910 | 76.-.T | 1.499331872 | 0.320393064 |
| 2211100 | 911 | 0.T.-; 27.-.A | 1.498766744 | 1.299978621 |
| 8558515 | 912 | 74.-.T | 1.498532736 | 0.244304059 |
| 4321895 | 913 | 4.T.-; 65.GC.-T | 1.498442707 | 0.661273129 |
| 12204638 | 914 | 2.A.-; 75.C.- | 1.49596065 | 0.654918883 |
| 8118238 | 915 | 76.GG.-C | 1.495070866 | 0.554503755 |
| 2348592 | 916 | 0.T.-; 19.-.T | 1.493134598 | 0.463440478 |
| 3282394 | 917 | 0.T.-; 2.A.G; | 1.490851105 | 1.143853171 |
| | | 88.GA.-C | | |
| 9974216 | 918 | 19.-.G; 76.GG.-A | 1.489833949 | 0.650334517 |
| 3435006 | 919 | 0.T.-; 2.A.G; | 1.487780343 | 0.572012417 |
| | | 17.-.T | | |
| 2291281 | 920 | 0.T.-; 78.AG.-C | 1.48644962 | 0.721753764 |
| 3013663 | 921 | 1.TA.--; 99.-.G | 1.484001366 | 0.730348567 |
| 7255023 | 922 | 27.-.C; 70.-.T | 1.483723737 | 1.383884246 |
| 4307384 | 923 | 4.T.-; 75.C.- | 1.483251669 | 0.591919226 |
| 2702279 | 924 | 0.T.-; 2.A.C; | 1.482180584 | 1.154754969 |
| | | 86.CC.-G | | |
| 3036396 | 925 | 1.TA.--; 74.-.T | 1.480425433 | 0.455235967 |
| 10196645 | 926 | 18.-.G; 78.-.C | 1.478934738 | 0.7577364 |
| 4308690 | 927 | 4. T.-74.-.T | 1.478644519 | 0.955354495 |
| 4298804 | 928 | 4.T.-; 78.A.G | 1.476605159 | 0.725427219 |
| 12125860 | 929 | 2.A.-; 76.G.-; | 1.47599621 | 0.782159575 |
| | | 78.A.C | | |
| 2675530 | 930 | 0.T.-; 2.A.C; | 1.473977708 | 1.266428954 |
| | | 90.T.- | | |
| 7242260 | 931 | 27.-.C; 88.G.- | 1.473373043 | 1.439338655 |
| 4287312 | 932 | 4.T.-; 82.AA.-T | 1.472766154 | 0.577453742 |
| 3339492 | 933 | 2.A.G; 0.T.-; | 1.471548367 | 1.444939954 |
| | | 73.AT.-C | | |
| 4290113 | 934 | 4.T.-; 80.A.- | 1.470113687 | 0.639199692 |
| 2293835 | 935 | 0.T.-; 78.A.-; 80.A.- | 1.469388611 | 0.86669662 |
| 6455860 | 936 | 16.-.C; 74.-.C | 1.467963371 | 0.526897826 |
| 2706303 | 937 | 0.T.-; 2.A.C; | 1.467184493 | 1.023191849 |
| | | 82.AA.--; 85.T.C | | |
| 7252350 | 938 | 27.-.C; 76.-.T | 1.467027327 | 1.179599877 |
| 3277392 | 939 | 0.T.-; 2.A.G; | 1.466923265 | 1.201147414 |
| | | 85.TC.-A | | |
| 8538161 | 940 | 75.-.G; 132.G.C | 1.466591325 | 0.427589068 |
| 8202442 | 941 | 87.-.A | 1.464924451 | 0.818791149 |
| 2898633 | 942 | 1.-.C; 78.-.C | 1.464030898 | 0.456291529 |
| 2648767 | 943 | 2.A.C; 0.T.-; 73.-.A | 1.463173362 | 0.658913335 |
| 6115163 | 944 | 14.-.A; 88.G.- | 1.46294421 | 0.52938306 |
| 10576534 | 945 | 15.-.T; 55.-.T | 1.461210677 | 0.556416566 |
| 1904556 | 946 | 0.TTA.---; 3.C.A; | 1.461144948 | 1.088815589 |
| | | 76.GG.-C | | |
| 8073267 | 947 | 74.-.C | 1.458640802 | 0.430303917 |
| 8755280 | 948 | 55.-.T | 1.458287413 | 0.637579805 |
| 2341059 | 949 | 0.T.-; 28.-.C | 1.457350597 | 1.284432147 |
| 3007006 | 950 | 1.TA.--; 90.T.- | 1.45647646 | 1.125399861 |
| 7833962 | 951 | 55.-.G; 87.-.G | 1.456238024 | 0.883248585 |
| 4299868 | 952 | 4.T.-; 78.-.T | 1.455724565 | 0.940309293 |
| 8342692 | 953 | 89.A.G | 1.454833967 | 0.974687875 |
| 2262741 | 954 | 0.T.-; 85.TC.-A | 1.451410557 | 0.583323465 |
| 1942088 | 955 | 0TT.--; 2.A.C; | 1.450492391 | 1.215838114 |
| | | 86.C.- | | |
| 10200245 | 956 | 18.-.G; 74.-.T | 1.448405766 | 0.937707192 |
| 4219211 | 957 | 4.T.-; 72.-.A | 1.446520177 | 0.549344991 |
| 2457931 | 958 | 1.TA.--; 3.C.A; | 1.444076731 | 0.735893179 |
| | | 75.-.C | | |
| 3038631 | 959 | 1.TA.--; 73.AT.-G | 1.443584213 | 0.559939739 |
| 12753950 | 960 | 0.-.T; 73.A.- | 1.4435332 | 0.573037517 |
| 2129014 | 961 | 0.TTA.---; 3.C.G; | 1.439545748 | 1.366024853 |
| | | 75.-.G | | |
| 7833901 | 962 | 55.-.G; 86.C.- | 1.439456801 | 0.67108624 |
| 10066878 | 963 | 19.-.T; 74.-.C | 1.43944975 | 0.662912873 |

TABLE 11

| | SEQ | | | |
|---|---|---|---|---|
| index | ID NO | muts_1indexed | MI | 95% CI |
| 2714726 | 964 | 0.T.-; 2.A.C; | 1.438502347 | 0.738791942 |
| | | 77.GA.--; 83.A.T | | |
| 12106738 | 965 | 2.A.-; 72.-.G | 1.437789303 | 1.200787575 |
| 2720418 | 966 | 0.T.-; 2.A.C; | 1.43644621 | 1.201219979 |
| | | 77.GA.--; 80.A.C | | |
| 2291924 | 967 | 0.T.-; 78.A.C | 1.4359349 | 0.93677707 |
| 9991025 | 968 | 19.-.G; 81.GA.-T | 1.434371779 | 0.688279351 |
| 4243954 | 969 | 4.T.-; 85.TC.-A | 1.432539899 | 0.673581956 |
| 6362816 | 970 | 17.-.A; 75.-.C | 1.432516289 | 0.887237626 |
| 8204227 | 971 | 87.C.A | 1.432133272 | 1.064542809 |
| 1980019 | 972 | 0.T.C; 78.A.- | 1.431187129 | 0.702091337 |
| 8142815 | 973 | 76.G.-; 130.T.G | 1.429104435 | 0.270795433 |
| 10554966 | 974 | 15.-.T; 80.A.- | 1.428888329 | 1.003322663 |
| 2702620 | 975 | 0.T.-; 2.A.C; | 1.427340154 | 0.891520531 |
| | | 86.C.T | | |
| 8142856 | 976 | 76.G.-; 132.G.C | 1.427043687 | 0.237774998 |
| 12012995 | 977 | 2.A.-; 16.-.C | 1.424513327 | 0.515408648 |
| 4284095 | 978 | 4.T.-; 82.AA.-C | 1.424103366 | 0.718417545 |
| 10546168 | 979 | 15.-.T; 88.-.T | 1.423883538 | 1.002262718 |
| 8128579 | 980 | 75.-.C | 1.423710515 | 0.273255106 |
| 2703946 | 981 | 2.A.C; 0.T.-; | 1.423451845 | 1.275687556 |
| | | 82.A.-; 85.T.G | | |
| 12433040 | 982 | 1.TAC.---; 76.G.- | 1.422927656 | 0.851734633 |
| 12162901 | 983 | 2.A.-; 89.-.C | 1.42171048 | 0.831363626 |
| 2814556 | 984 | 0.T.-; 2.A.C; 19.-.G | 1.420198732 | 0.571931257 |
| 8142933 | 985 | 76.G.-; 132.G.T | 1.41986544 | 0.297329476 |
| 2710592 | 986 | 2.A.C; 0.T.-; 81.-.G | 1.419787754 | 0.684050276 |
| 8537382 | 987 | 75.-.G; 121.C.A | 1.419392503 | 0.407819009 |
| 12434064 | 988 | 1.TAC.---; 86.-.C | 1.417035784 | 0.739250344 |
| 12438652 | 989 | 1. TAC.---; 75.C.- | 1.416797803 | 0.893829093 |
| 8105679 | 990 | 76.GG.-A | 1.415509749 | 0.237573505 |
| 8089861 | 991 | 75.-.A; 86.-.C | 1.414086312 | 0.397272867 |
| 10177945 | 992 | 18.-.G; 72.-.A | 1.413781205 | 0.836300188 |
| 4243445 | 993 | 4.T.-; 81.GA.-C | 1.413254084 | 0.887148369 |
| 8123491 | 994 | 75.-.C; 88.G.- | 1.41240947 | 0.440956817 |
| 4313666 | 995 | 4.T.-; 70.-.T | 1.411481565 | 0.506158491 |
| 7180551 | 996 | 27.-.A; 76.-.A | 1.409575725 | 1.180673384 |
| 6534510 | 997 | 17.-.G; 76.GG.-T | 1.407215614 | 0.941339052 |
| 3025550 | 998 | 1.TA.--; 82.AA.-T | 1.406508777 | 0.569736842 |
| 10275000 | 999 | 17.-.T; 71.-.C | 1.40607729 | 0.754323892 |
| 8530347 | 1000 | 75.-C.GA | 1.405553591 | 0.332518861 |
| 12438782 | 1001 | 1.TAC.---; 74.-.T | 1.404014328 | 0.86810435 |
| 2724111 | 1002 | 2.A.C; 0.T.-; 78.A.-; | 1.402948435 | 1.013377956 |
| | | -80.A. | | |
| 12682492 | 1003 | 0.-.T; 27.-.C | 1.402481385 | 1.265768183 |
| 8336449 | 1004 | 89.-.C | 1.399968085 | 0.251375019 |
| 2994450 | 1005 | 1.TA.--; 74.-.C | 1.399303097 | 0.436372549 |
| 10070026 | 1006 | 19.-.T; 76.G.- | 1.398597697 | 0.599022476 |
| 4246898 | 1007 | 4.T.-; 86.CC.-A | 1.398315453 | 0.996312871 |
| 2056199 | 1008 | 0TT.--; 2.A.G; | 1.397796768 | 1.058988953 |
| | | 82.AA.-T | | |
| 2726405 | 1009 | 0.T.-; 2.A.C; | 1.397727971 | 0.988558899 |
| | | 77.G.T | | |
| 8093322 | 1010 | 75.-.A | 1.396233471 | 0.309278367 |
| 4239175 | 1011 | 4.T.-; 77.-.C | 1.395763792 | 0.978685252 |
| 3031832 | 1012 | 1.TA.--; 78.-.T | 1.394964503 | 0.529438738 |
| 2303944 | 1013 | 0.T.-; 73.A.- | 1.394767477 | 0.685653215 |
| 2255406 | 1014 | 0.T.-; 76.GG.-- | 1.39467151 | 1.055424187 |
| 2468522 | 1015 | 1.TA.--; 3.C.A; | 1.393765331 | 0.747608286 |
| | | 74.-.T | | |
| 8543995 | 1016 | 75.-.G; 86.C.- | 1.39257441 | 0.371930382 |
| 8348831 | 1017 | 88.-.T | 1.392335932 | 0.333299943 |
| 2899043 | 1018 | 1.-.C; 78.A.- | 1.392119807 | 0.692690413 |
| 6611143 | 1019 | 18.C.-; 75.-.A | 1.391822496 | 0.602240717 |
| 8142880 | 1020 | 76.G.- | 1.39077182 | 0.256141665 |
| 4294538 | 1021 | 4.T.-; 78.A.C | 1.390406199 | 0.607275427 |
| 447196 | 1022 | -27.C.A; 75.-.G | 1.390265949 | 0.365279208 |
| 3338210 | 1023 | 2.A.G; 0.T.-; | 1.390242773 | 0.685982978 |
| | | 75.CG.-T | | |
| 8538250 | 1024 | 75.-.G; 131.A.C | 1.389343955 | 0.441726963 |
| 10302419 | 1025 | 17.-.T; 83.-.C | 1.388447653 | 1.345445476 |
| 3169133 | 1026 | 0.T.-; 2.A.G; | 1.387799855 | 0.626570598 |
| | | 16.-.C | | |
| 1855234 | 1027 | 0.TT.--; 86.-.C | 1.386552663 | 0.590192706 |
| 3027053 | 1028 | 1.TA.--; 80.A.- | 1.386335615 | 0.44423395 |
| 8142905 | 1029 | 76.G.-; 133.A.C | 1.386299403 | 0.311670925 |
| 2465375 | 1030 | 1.TA.--; 3.C.A; | 1.386188008 | 0.849600498 |
| | | 81.GA.-T | | |
| 8137397 | 1031 | 76.G.-; 98.-.A | 1.38509752 | 0.65791826 |
| 3304306 | 1032 | 2.A.G; 0.T.-; | 1.38362179 | 1.225993381 |
| | | 89.A.- | | |
| 8537231 | 1033 | 75.-.G; 120.C.A | 1.383053376 | 0.450967918 |
| 4299393 | 1034 | 4.T.-; 78.AG.-T | 1.382187217 | 1.034357685 |
| 3295454 | 1035 | 2.A.G; 0.T.-; | 1.381863603 | 1.038871163 |
| | | 99.-.G | | |
| 8519489 | 1036 | 76.GG.-T | 1.379556363 | 0.163945711 |
| 3264318 | 1037 | 2.A.G; 0.T.-; | 1.379358937 | 0.702823304 |
| | | 75.-.A | | |
| 3266116 | 1038 | 2.A.G; 0.T.-; | 1.379046637 | 0.672325549 |
| | | 76.GG.-A | | |
| 2997992 | 1039 | 1.TA.--; 76.-.A | 1.378072319 | 0.700284634 |
| 2672282 | 1040 | 2.A.C; 0.T.-; | 1.376499067 | 0.804782737 |
| | | 86.CC.-A | | |
| 14798941 | 1041 | -29.A.C; 75.-.C | 1.375822882 | 0.254844812 |
| 12031760 | 1042 | 2.A.-; 27.G.- | 1.375192693 | 1.374595871 |
| 2201185 | 1043 | 0.T.-; 16.-.C | 1.372900924 | 0.445813321 |
| 2400173 | 1044 | 1.-.A; 76.G.- | 1.372064456 | 0.596118731 |
| 10088256 | 1045 | 19.-.T; 76.G.-; | 1.369986019 | 0.714603396 |
| | | 78.A.T | | |
| 10284913 | 1046 | 17 -.T; 77.- A | 1.369839502 | 1.090311599 |

TABLE 12

| | SEQ | | | |
|---|---|---|---|---|
| index | ID NO | muts_1indexed | MI | 95% CI |
| 10545701 | 1047 | 15.-.T; 89.A.- | 1.369748818 | 1.003332985 |
| 8212851 | 1048 | 86.-.C | 1.369391509 | 0.539620134 |
| 8132895 | 1049 | 75.-.C; 86.C.- | 1.368039243 | 0.296779105 |
| 3281950 | 1050 | 2.A.G; 0.T.-; | 1.367611373 | 0.907291353 |
| | | 86.-.C | | |
| 1858655 | 1051 | 0.TT.--; 87.-.G | 1.367558992 | 0.620186488 |
| 12737396 | 1052 | 0.-.T; 86.C.- | 1.365343254 | 0.552234176 |
| 6474033 | 1053 | 16.-.C; 80.A.- | 1.363437029 | 0.56174258 |
| 2646406 | 1054 | 0.T.-; 2.A.C; | 1.36343607 | 1.115304879 |
| | | 72.-.G | | |
| 3020097 | 1055 | 1.TA.--; 86.-.G | 1.363355265 | 0.580106368 |
| 12160739 | 1056 | 2.A.-; 91.A.-; | 1.363329423 | 1.066828539 |
| | | 93.A.G | | |
| 14919005 | 1057 | -29.A.C; 2.A.-; | 1.362482864 | 0.432898468 |
| | | 76.G.- | | |
| 10527714 | 1058 | 15.-.T; 79.G.- | 1.361775897 | 0.846824969 |
| 3023033 | 1059 | 1.TA.--; 82.A.-; | 1.361357615 | 1.194817135 |
| | | 84.A.G | | |
| 2467773 | 1060 | 1.TA.--; 3.C.A; | 1.36121818 | 0.679797788 |
| | | 76.-.T | | |
| 2284824 | 1061 | 0.T.-83.-.T | 1.360543389 | 0.848033047 |
| 9987305 | 1062 | 19.-.G; 87.-.G | 1.360442144 | 0.734418526 |
| 2628450 | 1063 | 2.A.C; 0.T.-; | 1.360069277 | 0.861447129 |
| | | 65.GC.-A | | |
| 8531228 | 1064 | 75.-.G; 87.-.A | 1.359545621 | 0.690949702 |
| 1939243 | 1065 | 0.TT.--; 2.A.C; | 1.358280955 | 0.943115167 |
| | | 86.-C | | |
| 3050495 | 1066 | 1.TA.--; 55.-.T | 1.358171094 | 0.87966165 |
| 7835450 | 1067 | 55.-.G; 78.A.- | 1358033334 | 0.698343089 |
| 12702721 | 1068 | 0.-.T; 55.-.G | 1.357295007 | 0.530874809 |
| 4231994 | 1069 | 4.T.-; 76.-.A | 1.357045893 | 0.79932847 |
| 10185683 | 1070 | 18.-.G; 88.G.- | 1.35658647 | 1.037901 |
| 2709497 | 1071 | 2.A.C; 0.T.-; | 1.355764778 | 1.203503878 |
| | | 82.A.C | | |
| 8330844 | 1072 | 91.A.G | 1.355287946 | 1.033211677 |
| 10287644 | 1073 | 17.-.T; 85.TC.-G | 1.355153586 | 1.18231053 |
| 9976346 | 1074 | 19.-.G; 77.-.A | 1.354948471 | 0.743583366 |
| 8759277 | 1075 | 55.-.T; 75.-.G | 1.352910748 | 0.800352238 |
| 2711676 | 1076 | 2.A.C; 0.T.-; | 1.351869067 | 0.771861665 |
| | | 82.AA.-G | | |
| 10199887 | 1077 | 18.-.G; 75.C.- | 1.351414349 | 0.818440979 |
| 12131652 | 1078 | 2.A.-; 85.TC.-A | 1.351255788 | 1.139173311 |
| 8628479 | 1079 | 66.CT.-G; 76.G.- | 1.350688923 | 0.362115272 |
| 2459762 | 1080 | 1.TA.--; 3.C.A; | 1.350298722 | 1.009173521 |
| | | 87.-.A | | |
| 8647329 | 1081 | 66.C.T | 1.350057167 | 1.188259683 |
| 6526262 | 1082 | 17.-.G; 76.G.- | 1.349925914 | 1.264875753 |
| 2279498 | 1083 | 0.T.-; 88.-.T | 1.349921712 | 0.487773646 |
| 2719218 | 1084 | 0.T.-; 2.A.C; 79. | 1.349444156 | 1.087166266 |
| | | GAGAAA.TTTCTC | | |
| 1858516 | 1085 | 0.TT.--; 86.C.- | 1.349395537 | 1.336682614 |
| 14798574 | 1086 | -29.A.C; 76.GG.-C | 1.34699507 | 0.500207927 |
| 10178596 | 1087 | 18.-.G; 72.-.C | 1.346450015 | 0.765748852 |
| 8118222 | 1088 | 76.GG.-C; 132.G.C | 1.34615675 | 0.516935159 |
| 12181387 | 1089 | 2.A.-; 82.-.T | 1.344913969 | 0.639139505 |
| 10285141 | 1090 | 17.-.T; 76.G.-; | 1.344831557 | 0.980116215 |
| | | 78.A.C | | |
| 8565359 | 1091 | 75.CG.-T | 1.344784065 | 0.28783714 |
| 8142963 | 1092 | 76.G.-; 131.A.C | 1.344489963 | 0.258971589 |
| 6313836 | 1093 | 16.-.A; 78.A.- | 1.341546233 | 0.715419964 |
| 6455586 | 1094 | 16.-.C; 74.T.- | 1.340536921 | 0.588962188 |
| 10069022 | 1095 | 19.-.T; 76.GG.-C | 1.339199983 | 0.689265401 |
| 8538125 | 1096 | 75.-.G; 130.T.G | 1.339090974 | 0.405488829 |
| 8208034 | 1097 | 88.G.- | 1.339014146 | 0.22663535 |
| 4210228 | 1098 | 4.T.-; 65.G.- | 1.337504821 | 0.725776958 |
| 8555144 | 1099 | 74.-.T; 86.-.C | 1.336356371 | 0.495439384 |
| 2211631 | 1100 | 0.T.-; 27.G.- | 1.335840597 | 1.02295738 |
| 14799468 | 1101 | -29.A.C; 76.G.- | 1.335226973 | 0.265255991 |
| 3023524 | 1102 | 1.TA.--; 82.AA.-- | 1.334715286 | 0.777258592 |
| 14921453 | 1103 | -29.A.C; 2.A.-; | 1.334084702 | 0.448087214 |
| | | 75.-.G | | |
| 2465666 | 1104 | 1.TA.--; 3.C.A; | 1.333777233 | 1.225453831 |
| | | 80.A.-- | | |
| 2124272 | 1105 | 0.TTA.---; 3.C.G; | 1.333161176 | 1.020991136 |
| | | 86.-.C | | |
| 4366553 | 1106 | 4.T.-; 28.-.C | 1.333118117 | 1.147457336 |
| 15160651 | 1107 | -29.A.G; 75.-.C | 1.332785693 | 0.280235081 |
| 2248937 | 1108 | 0.T.-; 70.T.-; 73.A.C | 1.329283638 | 1.288981376 |
| 10307622 | 1109 | 17.-.T; 78.A.C | 1.328660147 | 0.893411396 |
| 2670634 | 1110 | 0.T.-; 2.A.C; | 1.327285114 | 0.860888625 |
| | | 85.TC.-- | | |
| 10180147 | 1111 | 18.-.G; 74.-.C | 1.326125292 | 0.932899353 |
| 10288203 | 1112 | 17.-.T; 87.-.A | 1.325075156 | 0.741328018 |
| 14806896 | 1113 | -29.A.C; 87.-.G | 1.324442672 | 0.255955368 |
| 2708627 | 1114 | 0.T.-; 2.A.C; | 1.32346629 | 0.575802358 |
| | | 82.AA.- | | |
| 3260655 | 1115 | 2.A.G; 0.T.-; 74.T.- | 1.322242725 | 0.641221404 |
| 12719454 | 1116 | 0.-.T; 76.GG.-A | 1.322124436 | 0.483164367 |
| 12432022 | 1117 | 1.TAC.---; 74.-.C | 1.320938397 | 0.64685233 |
| 4245923 | 1118 | 4.T.-; 85.TC.-G | 1.320596842 | 1.255360283 |
| 8363261 | 1119 | 87.-.T | 1.320550533 | 0.482292904 |
| 2128723 | 1120 | 0.TTA.---; | 1.318357676 | 1.198530269 |
| | | 3.C.G; 76.GG.-T | | |
| 8514493 | 1121 | 77.-.T | 1.317772824 | 0.80389443 |
| 3330625 | 1122 | 0.T.-; 2.A.G; | 1.317088275 | 1.251882713 |
| | | 77.-.T | | |
| 10279842 | 1123 | 17.-.T; 74.-.G | 1.316219704 | 0.99735284 |
| 3271300 | 1124 | 2.A.G; 0.T.-; | 1.315040838 | 0.602125183 |
| | | 76.G.- | | |
| 12209957 | 1125 | 2.A.-; 73.-.G | 1.314239351 | 1.123034513 |
| 2295677 | 1126 | 0.T.-; 76.G.-; | 1.313626293 | 0.643771948 |
| | | 78.A.T | | |
| 7188615 | 1127 | 27.-.A; 79. | 1.311956522 | 1.250658747 |
| | | GAGAAA.TTTCTC | | |

TABLE 13

| | SEQ | | | |
|---|---|---|---|---|
| index | ID NO | muts_1indexed | MI | 95% CI |
| 8638657 | 1128 | 66.CT.-G; 78.A.- | 1.311428923 | 0.33055537 |
| 6470437 | 1129 | 16.-.C; 86.-.G | 1.309929002 | 0.430012879 |
| 12102732 | 1130 | 2.A.-; 72.-.A | 1.307434337 | 0.918377829 |
| 8142718 | 1131 | 76.G.-; 129.C.A | 1.304595264 | 0.256619569 |
| 8156448 | 1132 | 77.-.C | 1.304175846 | 0.589870986 |
| 1852995 | 1133 | 0.TT.--; 75.-.C | 1.303475262 | 0.900561689 |
| 2887175 | 1134 | 1.-.C; 88.G.- | 1.302706726 | 0.597968881 |
| 2263396 | 1135 | 0.T.-; 85.T.- | 1.302466047 | 1.134047233 |
| 1825818 | 1136 | 0.TT.-A; 76.G.- | 1.301875777 | 1.110318533 |
| 8344169 | 1137 | 89.A.- | 1.301561654 | 1.225981484 |
| 2709285 | 1138 | 2.A.C; 0.T.-; | 1.30091689 | 0.894342408 |
| | | 82.-.C | | |
| 3023675 | 1139 | 1.TA.--; 82.A.-; | 1.299899754 | 0.818223111 |
| | | 84.A.T | | |
| 10084841 | 1140 | 19.-.T; 81.GA.-T | 1.297930762 | 0.600453513 |
| 1976248 | 1141 | 0.T.C; 86.-.C | 1.297836547 | 0.825789148 |
| 12154344 | 1142 | 2.A.-; 99.-.G | 1.296306945 | 1.001477179 |
| 13097626 | 1143 | -1.GT.--; 76.G.- | 1.295125439 | 0.441980787 |
| 6458438 | 1144 | 16.-.C; 76.-.A | 1.29467865 | 0.846781549 |
| 8150274 | 1145 | 77.-.A | 1.294485982 | 0.228877584 |
| 8757116 | 1146 | 55.-.T; 87.-.G | 1.292770836 | 0.600605612 |
| 2701481 | 1147 | 0.T.-; 2.A.C; | 1.291935395 | 0.554674604 |
| | | 87.C.T | | |
| 6458094 | 1148 | 16.-.C; 76.GG.-A | 1.289567023 | 1.072472271 |
| 8096141 | 1149 | 75.-.A; 87.-.G | 1.289021439 | 0.399874445 |
| 1937383 | 1150 | 0.TT.--; 2.A.C; | 1.288410807 | 1.057575643 |
| | | 76.GG.-C | | |
| 10527226 | 1151 | 15.-.T; 76.G.-; | 1.288081249 | 0.940790829 |
| | | 78.A.C | | |
| 2461285 | 1152 | 1.TA.--; 3.C.A | 1.288043851 | 1.103673268 |
| 9999142 | 1153 | 19.-.G; 73.A.- | 1.286125046 | 0.905401071 |
| 8190839 | 1154 | 85.TC.-- | 1.285570034 | 0.96890997 |
| 4021093 | 1155 | 3.-.C; 87.-.G | 1.285356603 | 0.94937054 |
| 8128562 | 1156 | 75.-.C; 132.G.C | 1.283817887 | 0.295940599 |
| 4026117 | 1157 | 3.-.C; 76.GG.-T | 1.282205843 | 0.870543947 |
| 3458694 | 1158 | 0.TTAC.----; | 1.2817117 | 1.235570501 |
| | | 75.-.C | | |
| 2402393 | 1159 | 1.-.A; 87.-.A | 1.281613783 | 0.828164871 |
| 1852100 | 1160 | 0.TT.--; 75.-.A | 1.281266877 | 0.682106006 |
| 3325688 | 1161 | 2.A.G; 0.T.-; | 1.280888677 | 0.892056905 |
| | | 78.A.- | | |
| 2742029 | 1162 | 0.T.-; 2.A.C; | 1.280778188 | 0.548022631 |
| | | 73.A.T | | |
| 6577492 | 1163 | 18.-.A; 86.-.C | 1.279802601 | 0.717533757 |
| 12218636 | 1164 | 2.A.-; 66.CT.-G | 1.279066994 | 0.773028062 |
| 8219007 | 1165 | 89.-.A | 1.278500325 | 1.111071537 |
| 6369323 | 1166 | 17.-.A; 76.GG.-T | 1.278457146 | 0.804381168 |
| 2651674 | 1167 | 0.T.-; 2.A.C; | 1.278172092 | 1.277273592 |
| | | 74.TC.-- | | |
| 12717259 | 1168 | 0.-.T; 74.-.C | 1.277376795 | 0.540831784 |
| 15160113 | 1169 | -29.A.G; | 1.277357928 | 0.269809108 |
| | | 76.GG.-A | | |
| 2900998 | 1170 | 1.-.C; 76.-.T | 1.277094929 | 0.459925786 |
| 1864123 | 1171 | 0.TT.--; 74.-.T | 1.275311167 | 0.782684718 |
| 1936243 | 1172 | 0.TT.--; 2.A.C; | 1.26922446 | 0.978313316 |
| | | 73.-.A | | |
| 10087310 | 1173 | 19.-.T; 76.-.G | 1.268648221 | 1.013020879 |
| 8128641 | 1174 | 131.A.C; 75.-.C | 1.268371306 | 0.347123635 |
| 2466267 | 1175 | 1.TA.--; 3.C.A; | 1.267812234 | 0.761193775 |
| | | 78.-.C | | |
| 14814370 | 1176 | -29.A.C; 74.-.T | 1.267572185 | 0.224895956 |
| 8367586 | 1177 | 86.-.G | 1.267571029 | 0.166811565 |
| 14814654 | 1178 | -29.A.C; | 1.267223704 | 0.299661636 |
| | | 75.CG.-T | | |
| 7178892 | 1179 | 27.-.A; 72.-.C | 1.266580365 | 1.241702285 |
| 2713900 | 1180 | 0.T.-; 2.A.C; | 1.266523416 | 1.064785518 |
| | | 82.AA.--; | | |
| | | 84.A.T | | |
| 12745658 | 1181 | 0.-.T; 78.A.- | 1.266094696 | 0.628742094 |
| 12436108 | 1182 | 1.TAC.---; 86.C.- | 1.265494144 | 0.683395752 |
| 8490474 | 1183 | 76.-.G; 131.A.C | 1.264843818 | 0.316333863 |
| 6479094 | 1184 | 16.-.C; 75.CG.-T | 1.264484483 | 0.657988122 |
| 10280354 | 1185 | 17.-.T; 75.-.A | 1.264238931 | 1.254859427 |
| 10528666 | 1186 | 15.-.T; 77.GA.-- | 1.264204883 | 1.069840201 |
| 10303386 | 1187 | 17.-.T; 82.AA.-- | 1.264094608 | 1.141678594 |
| 2355406 | 1188 | 0.T.-; 15.-.T | 1.26208998 | 0.699889425 |
| 3032160 | 1189 | 1.TA.--; 78.A.T | 1.261906598 | 0.661737928 |
| 7237755 | 1190 | 27.-.C; 72.-.C | 1.261808889 | 1.185044155 |
| 2295261 | 1191 | 0.T.-; 78.A.T | 1.261798645 | 0.619874643 |
| 14798078 | 1192 | -29.A.C; | 1.261281447 | 0.214857356 |
| | | 76.GG.-A | | |
| 3307911 | 1193 | 0.T.-; 2.A.G; | 1.259023231 | 0.786548058 |
| | | 86.-.G | | |
| 8132962 | 1194 | 75.-.C; 87.-.G | 1.259001218 | 0.463752754 |
| 10181383 | 1195 | 18.-.G; | 1.258323933 | 0.523286921 |
| | | 75.CG.-A | | |
| 8197001 | 1196 | 86.-.A | 1.256849633 | 0.486914942 |
| 10309927 | 1197 | 17.-.T; 76.G.-; | 1.256782087 | 0.744678415 |
| | | 78.A.T | | |
| 2301271 | 1198 | 0.T.-; 73.AT.-C | 1.256424659 | 0.81100738 |
| 13853791 | 1199 | -14.A.C; 75.-.G | 1.255450038 | 0.42561035 |
| 8538003 | 1200 | 75.-.G; 128.T.G | 1.255025364 | 0.362250327 |
| 8531397 | 1201 | 75.-.G; 88.G.- | 1.254071245 | 0.476939803 |
| 10088571 | 1202 | 19.-.T; 76.GG.-T | 1.253979064 | 0.431051128 |
| 10090672 | 1203 | 19.-.T; 74.-.T | 1.253721121 | 0.83319223 |
| 9978638 | 1204 | 19.-.G; 87.-.A | 1.253713731 | 0.820915459 |
| 10183679 | 1205 | 18.-.G; 76.G.-; | 1.253476631 | 0.445201573 |
| | | 78.A.C | | |
| 2283016 | 1206 | 0.T.-; 82.A.- | 1.252963004 | 0.465519392 |
| 2695201 | 1207 | 0.T.-; 2.A.C; | 1.25282914 | 0.803574579 |
| | | 91.A.G | | |
| 6475853 | 1208 | 16.-.C; 76.-.G | 1.250559059 | 0.663368638 |
| 6111106 | 1209 | 14.-.A; | 1.249881883 | 0.738247287 |
| | | 76.GG.-A | | |
| 3082312 | 1210 | 1.TA.--; 17.-.T | 1.249436868 | 0.812464001 |

TABLE 14

| | SEQ | | | |
|---|---|---|---|---|
| index | ID NO | muts_1indexed | MI | 95% CI |
| 10566255 | 1211 | 15.-.T; 73.AT.-C | 1.248872576 | 0.813225669 |
| 10070730 | 1212 | 19.-.T; 79.G.- | 1.248861015 | 0.601945811 |
| 14812876 | 1213 | -29.A.C; 76.GG.-T | 1.248067875 | 0.150831793 |
| 1246999 | 1214 | -15.T.G; 76.G.- | 1.247102347 | 0.224797578 |
| 8558498 | 1215 | 74.-.T; 132.G.C | 1.246022069 | 0.249030346 |
| 10518792 | 1216 | 15.-.T; 72.-.G | 1.245964164 | 0.488651001 |
| 4277925 | 1217 | 4.T.-; 84.AT.-- | 1.245854234 | 0.936943861 |
| 8352817 | 1218 | 86.C.- | 1.244532434 | 0.150629215 |
| 8538048 | 1219 | 75.-.G; 129.C.A | 1.244280774 | 0.412263647 |
| 14797557 | 1220 | -29.A.C; 75.-.A | 1.242782689 | 0.319674168 |
| 8538200 | 1221 | 75.-.G; 133.A.C | 1.241616447 | 0.440187544 |
| 4283490 | 1222 | 4.T.-; 82.-.C | 1.24156885 | 0.687466845 |
| 1865218 | 1223 | 0.TT.--; 73.A.- | 1.240690771 | 0.7042098 |
| 6525015 | 1224 | 17.-.G; 75.-.A | 1.240613105 | 0.979161775 |
| 10181717 | 1225 | 18.-.G; 76.GG.-A | 1.23997956 | 1.137575689 |
| 6458686 | 1226 | 16.-.C; 76.GG.-C | 1.239775702 | 0.87363525 |
| 9978404 | 1227 | 19.-.G; 86.-.A | 1.239174316 | 0.801664764 |
| 9631659 | 1228 | 16.------------. | 1.2381472 | 1.157545889 |
| | | CTCATTACTTTG | | |
| 1938525 | 1229 | 0.TT.--; 2.A.C; | 1.234976889 | 0.873037971 |
| | | 77.GA.-- | | |
| 1907202 | 1230 | 0.TTA.---; 3.C.A; | 1.234558517 | 0.900076058 |
| | | 87.-.G | | |
| 2315524 | 1231 | 0.T.-; 55.-.T | 1.234352592 | 0.65468754 |
| 8531688 | 1232 | 75.-.G; 89.-.A | 1.234168624 | 0.685214819 |
| 14798356 | 1233 | -29.A.C; 76.-.A | 1.233456387 | 0.88515606 |
| 8590491 | 1234 | 73.A.G | 1.232844488 | 0.306976558 |
| 3335980 | 1235 | 2.A.G; 0.T.-; 75.C.- | 1.23143562 | 0.615508551 |
| 2695420 | 1236 | 0.T.-; 2.A.C; | 1.23131981 | 1.032803346 |
| | | 91.AA.-G | | |
| 3307298 | 1237 | 0.T.-; 2.A.G; 87.-.T | 1.231275978 | 0.519311047 |
| 2560220 | 1238 | 0.T.-; 2.A.C; 14.-.A | 1.231165601 | 0.62236647 |
| 15165185 | 1239 | -29.A.G; 87.-.G | 1.231041719 | 0.270182884 |
| 12718005 | 1240 | 0.-.T; 74.-.G | 1.230670859 | 0.871174328 |
| 10058332 | 1241 | 19.-.T; 55.-.G | 1.229512018 | 1.083906642 |
| 8532180 | 1242 | 75.-.G; 98.-.A | 1.229364421 | 0.748719278 |
| 7242912 | 1243 | 27.-.C; 90.-.G | 1.229092331 | 0.949305592 |
| 8105731 | 1244 | 76.GG.-A; 131.A.C | 1.228181078 | 0.230343111 |
| 2748293 | 1245 | 2.A.C; 0.T.-; 66.C.- | 1.227763647 | 0.98496011 |
| 3026215 | 1246 | 1.TA.--; 77.GA.--; | 1.226977479 | 0.997524073 |
| | | 83.A.T | | |
| 1938157 | 1247 | 0.TT.--; 2.A.C; | 1.225574228 | 0.831200101 |
| | | 77.-.A | | |
| 11775381 | 1248 | 2.-.C; 76.G.- | 1.225102258 | 0.595949363 |
| 15161003 | 1249 | -29.A.G; 76.G.- | 1.223889061 | 0.294582862 |
| 14811016 | 1250 | -29.A.C; 78.-.C | 1.222938798 | 0.273221745 |
| 7237431 | 1251 | 27.-.C; 72.-.A | 1.221788719 | 1.142877721 |
| 4220887 | 1252 | 4.T.-; 72.-.C | 1.219780408 | 0.66608177 |
| 10561000 | 1253 | 15.-.T; 76.G.-; | 1.218871558 | 0.647994569 |
| | | 78.A.T | | |
| 3318946 | 1254 | 0.T.-; 2.A.G; | 1.217687896 | 0.704918875 |
| | | 81.GA.-T | | |
| 10565555 | 1255 | 15.-.T; 75.CG.-T | 1.217561106 | 1.206694498 |
| 2644619 | 1256 | 2.A.C; 0.T.-; | 1.217521416 | 0.643415599 |
| | | 72.-.C | | |
| 12112275 | 1257 | 2.A.-; 74.T.G | 1.217072779 | 0.652972838 |
| 1862409 | 1258 | 0.TT.--; 76.-.G | 1.217021239 | 0.888749766 |
| 7189944 | 1259 | 27.-.A; 78.-.T | 1.216123094 | 1.075111755 |
| 6126842 | 1260 | 14.-.A; 78.-.C | 1.215991705 | 0.768204394 |
| 8543659 | 1261 | 75.-.G; 88.-.G | 1.214712222 | 0.655007886 |
| 2684568 | 1262 | 2.A.C; 0.T.- | 1.213071327 | 0.264663522 |
| 2697264 | 1263 | 2.A.C; 0.T.-; | 1.2126732 | 1.021553423 |
| | | 89.A.G | | |
| 4285424 | 1264 | 4.T.-; 82.A.G | 1.211126496 | 1.094417444 |
| 4298510 | 1265 | 4T.-; 78.A.-; | 1.209030922 | 0.66844537 |
| | | 80.A.- | | |
| 3594929 | 1266 | 2.-.A; 87.-.T | 1.208764231 | 0.738646374 |
| 10310746 | 1267 | 17.-.T; 76.-.T | 1.208539188 | 0.919441484 |
| 6535421 | 1268 | 17.-.G; 74.-.T | 1.207908272 | 0.926692004 |
| 2738172 | 1269 | 0.T.-; 2.A.C73.-.G | 1.207771032 | 1.035065567 |
| 1942201 | 1270 | 0.TT.--; 2.A.C; | 1.207677897 | 0.973271683 |
| | | 87.-.G | | |
| 8518877 | 1271 | 76.GG.-T; | 1.206646593 | 0.182266975 |
| | | 121.C.A | | |
| 15159780 | 1272 | -29.A.G; 75.-.A | 1.205938094 | 0.315739517 |
| 2290805 | 1273 | 0.T.-; 79. | 1.204355839 | 0.868799816 |
| | | GAGAAA.TTTCTC | | |
| 2399086 | 1274 | 1.-.A; 76.GG.-A | 1.203971897 | 0.48437301 |
| 1974829 | 1275 | 0.T.C; 76.GG.-A | 1.203879032 | 0.4210079 |

TABLE 15

| | SEQ | | | |
|---|---|---|---|---|
| index | ID NO | muts_1indexed | MI | 95% CI |
| 1192019 | 1276 | -15.T.G; 0.T.-; | 1.20360799 | 0.302971783 |
| | | 2.A.C | | |
| 8565342 | 1277 | 75.CG.-T; 132.G.C | 1.202289742 | 0.286937554 |
| 8357813 | 1278 | 87.-.G; 132.G.C | 1.201504305 | 0.284156001 |
| 14647197 | 1279 | -29.A.C; 0.T.-; | 1.19977199 | 0.596254455 |
| | | 2.A.C; 75.-.G | | |
| 10192426 | 1280 | 18.-.G; 86.C.- | 1.197676147 | 0.845523053 |
| 2239077 | 1281 | 0.T.-; 65.GC.-A | 1.197039025 | 0.827792408 |
| 12185807 | 1282 | 2.A.-; 80.A.-82.A.- | 1.195795094 | 1.14774883 |
| 14921338 | 1283 | -29.A.C; 2.A.-; | 1.194753512 | 0.590835399 |
| | | 76.GG.-T | | |
| 1909484 | 1284 | 0.TTA.---; 3.C.A; | 1.194601681 | 0.899923073 |
| | | 74.-.T | | |
| 10067367 | 1285 | 19.-.T; 74.-.G | 1.194366583 | 0.703892606 |
| 8406855 | 1286 | 82.A.-; 84.A.T | 1.19422157 | 0.570093929 |
| 3084704 | 1287 | 1.TA.--; 15.-.T | 1.194024744 | 0.639373123 |
| 8117630 | 1288 | 76.GG.-C; 121.C.A | 1.193941022 | 0.493915898 |
| 14813162 | 1289 | -29.A.C; 76.-.T | 1.193770617 | 0.312340253 |
| 10086912 | 1290 | 19.-.T; 78.A.- | 1.193704359 | 0.526544832 |
| 8565389 | 1291 | 75.CG.-T; 132.G.T | 1.19331243 | 0.298806463 |
| 6627225 | 1292 | 18.C.-; 76.GG.-T | 1.192355135 | 0.550645762 |
| 8485326 | 1293 | 76.-.G; 86.-.C | 1.192298677 | 0.493607798 |
| 1853928 | 1294 | 0.TT.--; 79.G.- | 1.191920618 | 0.949329516 |
| 12437875 | 1295 | 1.TAC.---; 76.-.G | 1.191773341 | 0.823417938 |
| 10182569 | 1296 | 18.-.G; 75.-.C | 1.191543511 | 0.876936342 |
| 6584325 | 1297 | 18.-.A; 76.-.G | 1.190997627 | 0.955552088 |
| 8638758 | 1298 | 66.CT.-G; 76.-.G | 1.190381196 | 0.453916978 |
| 6460324 | 1299 | 16.-.C; 79.G.- | 1.190312109 | 0.493534915 |
| 8365015 | 1300 | 87.C.T | 1.190052456 | 0.872602313 |
| 8490408 | 1301 | 76.-.G | 1.18960287 | 0.31994112 |
| 6525955 | 1302 | 17.-.G; 75.-.C | 1.188288682 | 1.099927803 |
| 6460105 | 1303 | 16.-.C; 76.G.-; | 1.187507242 | 0.685448258 |
| | | 78.A.C | | |
| 6112043 | 1304 | 14.-.A; 75.-.C | 1.18750131 | 0.773401733 |
| 1978266 | 1305 | 0.T.C; 86.C.- | 1.186318648 | 0.482781507 |
| 8636881 | 1306 | 66.CT.-G; 87.-.G | 1.186183907 | 0.213972824 |
| 15241255 | 1307 | -29.A.G; 2.A.-; | 1.185988694 | 0.443745556 |
| | | 75.-.G | | |
| 6362433 | 1308 | 17.-.A; 76.GG.-A | 1.185910029 | 0.85106617 |
| 2059902 | 1309 | 0.TT.--; 2.A.G; | 1.185892464 | 1.168809929 |
| | | 74.-.T | | |
| 14799744 | 1310 | -29.A.C; 77.-.A | 1.185825684 | 0.192460709 |
| 8118273 | 1311 | 76.GG.-C; | 1.18519234 | 0.62982038 |
| | | 132.G.T | | |
| 4278865 | 1312 | 4.T.-; 84.-.T | 1.184410432 | 1.107710251 |
| 10065094 | 1313 | 19.-.T; 72.-.C | 1.1828142 | 0.675106042 |
| 8561350 | 1314 | 74.-.T; 87.-.G | 1.182048719 | 0.393482481 |
| 15160423 | 1315 | -29.A.G; | 1.180793171 | 0.555546714 |
| | | 76.GG.-C | | |
| 2994738 | 1316 | 1.TA.--; 74.T.G | 1.18058976 | 0.979631175 |
| 15058565 | 1317 | -29.A.G; 0.T.-; | 1.180163675 | 0.270139027 |
| | | 2.A.C | | |
| 12222182 | 1318 | 2.A.-; 65.GC.-T | 1.179771955 | 0.796494205 |
| 2881480 | 1319 | 1.-.C; 74.T.- | 1.179501503 | 0.538435597 |
| 10193035 | 1320 | 18.-.G86.-.G | 1.17845471 | 0.684536204 |
| 6459089 | 1321 | 16.-.C; 75.-.C | 1.17843793 | 0.58933484 |
| 10298749 | 1322 | 17.-.T; 89.-.C | 1.178374767 | 0.684239424 |
| 8490381 | 1323 | 76.-.G; 132.G.C | 1.177042107 | 0.335663686 |
| 12306660 | 1324 | 2.A.-; 18.-.G | 1.177019617 | 0.435298202 |
| 8124036 | 1325 | 75.-.C; 98.-.A | 1.176947131 | 0.49926186 |
| 2893687 | 1326 | 1.-.C; 88.-.T | 1.17496713 | 0.780013503 |
| 6305247 | 1327 | 16.-.A; 77.GA.-- | 1.174157138 | 0.633742635 |
| 7248579 | 1328 | 27.-.C; 83.-.T | 1.173562933 | 1.083697051 |
| 2883890 | 1329 | 1.-.C; 75.-.C | 1.173398841 | 0.613509504 |
| 10183041 | 1330 | 18.-.G; 76.G.- | 1.173134322 | 0.967093776 |
| 2696443 | 1331 | 0.T.-; 2.A.C; | 1.173067193 | 0.976987691 |
| | | 89.A.C | | |
| 15239681 | 1332 | -29.A.G; 2.A.-; | 1.173012223 | 0.486727112 |
| | | 76.G.- | | |
| 8087771 | 1333 | 74.-.G; 87.-.G | 1.172944262 | 0.426278168 |
| 10285497 | 1334 | 17.-.T; 79.G.- | 1.17154961 | 0.929605625 |
| 8118258 | 1335 | 76.GG.-C; | 1.170986028 | 0.499395392 |
| | | 133.A.C | | |
| 8141939 | 1336 | 76.G.-; 121.C.A | 1.17085979 | 0.256575176 |
| 8066677 | 1337 | 74.T.- | 1.168909113 | 0.239501292 |
| 8558553 | 1338 | 74.-.T; 132.G.T | 1.167854164 | 0.29356652 |
| 6469022 | 1339 | 16.-.C; 89.-.C | 1.167563507 | 0.467845833 |
| 1046356 | 1340 | -17.C.A; 75.-.G | 1.166966628 | 0.334507035 |
| 10532753 | 1341 | 15.-.T; 89.-.A | 1.16628898 | 0.941587373 |
| 2706855 | 1342 | 2.A.C; 0.T.-; | 1.165750392 | 0.619157804 |
| | | 83.-.G | | |
| 12194678 | 1343 | 2.A.-; 78.A.G | 1.165471135 | 0.91536488 |
| 12126149 | 1344 | 2.A.-; 77.-.C | 1.164066997 | 0.392106235 |
| 3039439 | 1345 | 1.TA.--; 70.-.T | 1.162844229 | 1.00756116 |
| 8123371 | 1346 | 75.-.C; 87.-.A | 1.161856358 | 0.505141299 |
| 15160286 | 1347 | -29.A.G; 76.-.A | 1.161712843 | 0.721602172 |
| 8758541 | 1348 | 55.-.T; 80.A.- | 1.160729144 | 0.587416563 |
| 12433294 | 1349 | 1.TAC.---; | 1.160546375 | 0.559999519 |
| | | 79.G.- | | |
| 14801714 | 1350 | -29.A.C87.-.A | 1.15970438 | 0.841171049 |
| 15058156 | 1351 | 2.A.C; 0.T.-; | 1.158508484 | 0.396829259 |
| | | -29.A.G; 76.G.- | | |
| 2298993 | 1352 | 0.T.-; 75.C.- | 1.158479025 | 0.419303739 |
| 13100965 | 1353 | -1.GT.--; 78.A.- | 1.158052786 | 0.371262978 |
| 8438445 | 1354 | 77.GA.--; 83.A.T | 1.156188842 | 0.838502061 |
| 8519469 | 1355 | 76.GG.-T; | 1.155859915 | 0.148192041 |
| | | 132.G.C | | |

TABLE 16

| | SEQ | | | |
|---|---|---|---|---|
| index | ID NO | muts_1indexed | MI | 95% CI |
| 8569101 | 1356 | 75.CGG.-TT | 1.154557321 | 0.217307834 |
| 4310993 | 1357 | 4.T.-;73.AT.-C | 1.153274081 | 0.453854703 |
| 9971050 | 1358 | 19.-.G;72.-.C | 1.152740318 | 0.725290861 |
| 2996647 | 1359 | 1.TA.--;75.CG.-A | 1.151902848 | 0.811777159 |
| 8561305 | 1360 | 74.-.T;86.C.- | 1.151372297 | 0.237653764 |
| 8093224 | 1361 | 75.-.A;129.C.A | 1.151362432 | 0.273047434 |
| 3323632 | 1362 | 2.A.G;0.T.-;78.AG.- | 1.150994398 | 0.848919541 |
| | | C | | |
| 14663326 | 1363 | - | 1.150191366 | 0.599920591 |
| | | 29.A.C;0.T.-;2.A.G; | | |
| | | 75.-.G | | |
| 1936729 | 1364 | 0.TT.- | 1.15004696 | 1.030340427 |
| | | -;2.A.C;74.-.G | | |
| 1977130 | 1365 | 0.T.C | 1.148209421 | 0.707223693 |
| 8141742 | 1366 | 120.C.A;76.G.- | 1.148153033 | 0.267222437 |
| 1908681 | 1367 | 0.TTA.-- | 1.14774524 | 0.964815 |
| | | -;3.C.A;76.-.G | | |
| 3017898 | 1368 | 1.TA.--;89.A.G | 1.147741635 | 0.737313223 |
| 3340495 | 1369 | 0.T.-;2.A.G;73.A.C | 1.147576225 | 1.09581674 |
| 2254255 | 1370 | 0.T.-;75.CG.-A | 1.146513584 | 0.700676298 |
| 11953402 | 1371 | 2.AC.- | 1.145157595 | 1.093445431 |
| | | -;4.T.C;76.GG.-C | | |
| 2684619 | 1372 | 0.T.-;2.A.C; 132.G.T | 1.144862088 | 0.260357332 |
| 10314306 | 1373 | 17.-.T;73.AT.-C | 1.144426663 | 1.028995367 |
| 10559572 | 1374 | 15.-.T;78.A.G | 1.143699755 | 0.578604678 |
| 2630318 | 1375 | 2.A.C;0.T.-;66.CT.- | 1.143660067 | 0.5343262 |
| | | A | | |
| 1943847 | 1376 | 0.TT.- | 1.142911019 | 0.764533182 |
| | | -;2.A.C;81.GA.-T | | |
| 4270685 | 1377 | 4.T.-;90.-.T | 1.142261105 | 1.061096734 |
| 8066737 | 1378 | 74.T.-;131.A.C | 1.142106376 | 0.297627826 |
| 6101577 | 1379 | 14.-.A;55.-.G | 1.141633238 | 0.632413834 |
| 4279604 | 1380 | 4.T.-;82.A.- | 1.141087787 | 0.86559009 |
| 2284176 | 1381 | 0.T.-;83.-.G | 1.140852012 | 0.573812016 |
| 6480468 | 1382 | 16.-.C;70.-.T | 1.1398625 | 0.613893735 |
| 2640116 | 1383 | 0.T.-;2.A.C;71.-.C | 1.13661499 | 0.936457355 |
| 10194587 | 1384 | 18.-.G;82.AA.-C | 1.136546503 | 0.867225106 |
| 15456465 | 1385 | -30.C.G;75.-.G | 1.136361233 | 0.420956305 |
| 3432602 | 1386 | 0.T.-;2.A.G;18.-.G | 1.136032616 | 0.358683183 |
| 8345813 | 1387 | 89.-.T | 1.134872739 | 0.634425715 |
| 3023247 | 1388 | 1.TA.--;83.-.T | 1.134857334 | 0.960489164 |
| 10472698 | 1389 | 16.C.-;76.-.G | 1.134422965 | 0.910950327 |
| 1855129 | 1390 | 0.TT.--;88.G.- | 1.133496442 | 0.758584634 |
| 9993029 | 1391 | 19.-.G;78.A.- | 1.133174297 | 0.792593276 |
| 15168776 | 1392 | -29.A.G;76.GG.-T | 1.132498922 | 0.227015084 |
| 2464359 | 1393 | 1.TA.- | 1.131831655 | 1.057358093 |
| | | -;3.C.A;82.A.-;84.A. | | |
| | | G | | |
| 12156161 | 1394 | 2.A.-;98.-.T | 1.130993969 | 0.851874656 |
| 8544614 | 1395 | 75.-.G;82.A.- | 1.130902206 | 0.457628408 |
| 2278784 | 1396 | 0.T.-;89.A.G | 1.129976098 | 0.932328577 |
| 4229697 | 1397 | 4.T.-;75.CG.-A | 1.129356919 | 1.031398221 |
| 6461360 | 1398 | 16.-.C;82.-.A | 1.129237794 | 0.60908879 |
| 8128601 | 1399 | 133.A.C;75.-.0 | 1.129022276 | 0.316118395 |
| 6362009 | 1400 | 17.-.A;74.-.G | 1.127775382 | 0.792324832 |
| 14806733 | 1401 | -29.A.C;86.C.- | 1.127749344 | 0.128149617 |
| 1937160 | 1402 | 0.TT.- | 1.126385937 | 0.99995983 |
| | | -;2.A.C;76.GG.-A | | |
| 4311644 | 1403 | 4.T.-;73.A.C | 1.126234133 | 0.593451059 |
| 1863149 | 1404 | 0.TT.--;76.GG.-T | 1.126088195 | 0.642579265 |
| 15169751 | 1405 | -29.A.G;74.-.T | 1.12571698 | 0.264785044 |
| 14811726 | 1406 | -29.A.C;76.-.G | 1.125696747 | 0.337727802 |
| 6480066 | 1407 | 16.-.C;73.AT.-G | 1.125267029 | 0.917637118 |
| 3014440 | 1408 | 1.TA.--;98.-.T | 1.125187087 | 0.944870769 |
| 6473404 | 1409 | 16.-.C;82.AA.-T | 1.125183194 | 0.45047498 |
| 7179375 | 1410 | 27.-.A;73.-.A | 1.12275521 | 1.11852897 |
| 12303885 | 1411 | 2.A.-;19.-.T | 1.122538412 | 0.456330423 |
| 2267762 | 1412 | 0.T.-;98.-.A | 1.122023688 | 0.678726891 |
| 10318319 | 1413 | 17.-.T;66.CT.-G | 1.121565522 | 1.049618975 |
| 8093357 | 1414 | 75.-.A;132.G.T | 1.121299918 | 0.315044761 |
| 3027775 | 1415 | 1.TA.--;80.AG.-T | 1.120820262 | 0.672573613 |
| 10549691 | 1416 | 15.-.T;82.A.- | 1.11965366 | 0.843624461 |
| 8558571 | 1417 | 74.-.T;131.A.C | 1.119006524 | 0.242404014 |
| 12210725 | 1418 | 2.A.-;73.AT.-G | 1.118721361 | 0.804765677 |
| 6462677 | 1419 | 16.-.C;86.-.0 | 1.118051706 | 0.993606042 |
| 2281811 | 1420 | 0.T.-;86.CC.-T | 1.117740311 | 0.882847082 |
| 8496336 | 1421 | 78.A.-;80.A.- | 1.11711092 | 0.515102154 |
| 3038148 | 1422 | 1.TA.--;73.A.0 | 1.116865927 | 0.861601124 |
| 10199335 | 1423 | 75.-.G;127.T.G | 1.115860528 | 0.443672147 |
| 14801930 | 1424 | -29.A .C;88.G.- | 1.115492358 | 0.261525199 |
| 2885740 | 1425 | 1.-.C;81.GA.-C | 1.115472314 | 0.689247174 |
| 8436871 | 1426 | 81.GA.-T | 1.115411316 | 0.273931065 |
| 6533591 | 1427 | 17.-.G;78.-.C | 1.115398223 | 0.879526979 |
| 8508461 | 1428 | 78.A.T | 1.115273341 | 0.522766505 |
| 2303258 | 1429 | 0.T.-;70.-.T | 1.114089034 | 0.865293893 |
| 10200479 | 1430 | 18.-.G;75.CG.-T | 1.11302882 | 0.732217972 |
| 8142460 | 1431 | 76.G.-;126.C.A | 1.111268298 | 0.288237659 |
| 8490449 | 1432 | 76.-.G;132.G.T | 1.111184304 | 0.315337948 |
| 1862090 | 1433 | 0.TT.--;78.A.- | 1.110821771 | 0.799594856 |
| 8105143 | 1434 | 76.GG.-A;121.C.A | 1.110817347 | 0.256306387 |
| 10204124 | 1435 | 18.-.G;65.GC.-T | 1.110123297 | 0.661140904 |
| 2696979 | 1436 | 0.T.-2.A.C;88.-.G | 1.109825686 | 0.606525063 |
| 1246393 | 1437 | -15.T.G;76.GG.-A | 1.109540149 | 0.193534821 |
| 4277641 | 1438 | 4.T.-;84.-.C | 1.109476081 | 1.084635844 |
| 12163684 | 1439 | 2.A.-;88.-.G | 1.108884791 | 0.569947232 |
| 3643882 | 1440 | 3.CT.-A;76.GG.-A | 1.108525297 | 0.784501998 |
| 6461122 | 1441 | 16.-.C;81.GA.-C | 1.108411865 | 0.6256586 |
| 14645694 | 1442 | 2.A.C;0.T.-;-29.A.C | 1.108180575 | 0.267740202 |
| 2678659 | 1443 | 0.T.-;2.A.C;98.-.A | 1.108043817 | 0.375625961 |
| 2295085 | 1444 | 0.T.-;77.GA.- | 1.107908285 | 0.695122129 |
| | | -;80.A.T | | |
| 8127785 | 1445 | 75.-.C; 120.C.A | 1.107076026 | 0.298513014 |
| 8357871 | 1446 | 87.-.G;132.G.T | 1.106990466 | 0.336105007 |
| 12090020 | 1447 | 2.A.-;66.CT.-A | 1.106107395 | 0.759889566 |
| 3079463 | 1448 | 1.TA.--;19.-.T | 1.105122706 | 0.424402722 |
| 10277558 | 1449 | 17.-.T;72.-.G | 1.105013965 | 0.33485503 |
| 2694724 | 1450 | 0.T.-;2.A.C;92.A.T | 1.102493901 | 0.92875617 |
| 3135565 | 1451 | 1.T.G;3.C.-;75.C.- | 1.102427225 | 0.672977559 |
| 6304328 | 1452 | 16.-.A;75.-.0 | 1.102231603 | 0.655223933 |
| 2708067 | 1453 | 2.A.C;0.T.-;83.-.T | 1.102074657 | 0.85908326 |

TABLE 17

| | SEQ | | | |
|---|---|---|---|---|
| index | ID NO | muts_1indexed | MI | 95% CI |
| 6469331 | 1454 | 16.-.C;89.A.- | 1.101247124 | 0.790943347 |
| 10073526 | 1455 | 19.-.T;90.T.- | 1.100917015 | 0.917104807 |
| 3017595 | 1456 | 1.TA.--;89.AT.-G | 1.100705976 | 0.903502652 |
| 3031194 | 1457 | 1.TA.--;78.A.G | 1.100353042 | 1.041515667 |
| 12123777 | 1458 | 2.A.-;76.G.-;132.G.C | 1.099950644 | 0.426062735 |
| 15451300 | 1459 | -30.C.G;76.G.- | 1.099949995 | 0.258120629 |
| 8105041 | 1460 | 76.GG.-A;120.C.A | 1.099511776 | 0.197987545 |
| 2894267 | 1461 | 1.-.C;87.-.T | 1.099423144 | 0.721770941 |
| 2998547 | 1462 | 1.TA.--;76.GG.-C | 1.099108914 | 0.77205836 |
| 3022051 | 1463 | 1.TA.--;83.-.C | 1.098959048 | 0.800244551 |
| 8512487 | 1464 | 76.G.-;78.A.T | 1.098356606 | 0.434447312 |
| 2285757 | 1465 | 0.T.-;82.AA.-C | 1.09769235 | 0.581396293 |
| 6531470 | 1466 | 17.-.G;87.-.G | 1.097040084 | 0.891732461 |
| 3461447 | 1467 | 0.TTAC.----;78.A.- | 1.096939612 | 1.032099163 |
| 6475031 | 1468 | 16.-.C;78.-.C | 1.096131509 | 0.622829146 |
| 10194914 | 1469 | 18.-.G;82.AA.-G | 1.095184273 | 0.925851293 |
| 1041972 | 1470 | -17.C.A;76.G.- | 1.094390364 | 0.259851818 |
| 8537811 | 1471 | 75.-.G;126.C.A | 1.093652258 | 0.416192839 |
| 3020817 | 1472 | 1.TA.--;84.AT.-- | 1.093578537 | 1.006083902 |
| 2887379 | 1473 | 1.-.C;86.-.C | 1.09339523 | 0.649567308 |
| 1854285 | 1474 | 0.TT.--;77.GA.-- | 1.093372662 | 0.836050071 |
| 8357326 | 1475 | 87.-.G;121.C.A | 1.09282229 | 0.228022974 |
| 8128534 | 1476 | 75.-.C;130.T.G | 1.091710468 | 0.291584852 |
| 1947291 | 1477 | 0.TT.--;2.A.C;73.A.- | 1.091598518 | 1.082985081 |
| 12432721 | 1478 | 1.TAC.---;76.GG.-C | 1.091484949 | 0.424680956 |
| 1252779 | 1479 | -15.T.G;75.-.G | 1.091018899 | 0.435778338 |
| 3588353 | 1480 | 2.-.A;86.-.0 | 1.090352944 | 0.473490794 |
| 2900664 | 1481 | 1 .-.C;76.GG.-T | 1.090288414 | 0.927626492 |
| 8076983 | 1482 | 74.T.G | 1.090265095 | 0.516206235 |
| 2300899 | 1483 | 0.T.-;73.-.C | 1.088155007 | 0.922134256 |
| 12202788 | 1484 | 2.A.-;75.-.G;132.G.C | 1.086592764 | 0.396856807 |
| 10070325 | 1485 | 19.-.T;77.-.A | 1.085159477 | 0.602291028 |
| 14685826 | 1486 | -29.A.C;4.T.-;76.G.- | 1.084700709 | 0.875467461 |
| 14351033 | 1487 | -25.A.C;75.-.G | 1.084694375 | 0.401588153 |
| 8607376 | 1488 | 73.A.T | 1.084223593 | 0.466050446 |
| 12439360 | 1489 | 1.TAC.---;73.A.- | 1.08377761 | 0.784604612 |
| 12718596 | 1490 | 0.-.T;75.-.A | 1.082686019 | 0.729622493 |
| 2712801 | 1491 | 2.A.C;0.T.-;82.A.T | 1.082648143 | 1.029910332 |
| 6613293 | 1492 | 18.C.-;77.-.C | 1.081600577 | 0.704127135 |
| 8480766 | 1493 | 78.A.- | 1.080656792 | 0.244162899 |
| 2414074 | 1494 | 1.-.A;75.CG.-T | 1.078260507 | 0.690226021 |
| 8105662 | 1495 | 76.GG.-A;132.G.C | 1.078192392 | 0.265594919 |
| 2282078 | 1496 | 0.T.-;84.AT.-- | 1.077981676 | 1.017841506 |
| 8096091 | 1497 | 75.-.A;86.C.- | 1.077805608 | 0.284536894 |
| 442111 | 1498 | -27.C.A;76.GG.-C | 1.077745882 | 0.495264554 |
| 12161656 | 1499 | 2.A.-;91.A.G | 1.075879018 | 0.678047969 |
| 9997135 | 1500 | 19.-.G;75.CG.-T | 1.075769653 | 0.617579849 |
| 6480747 | 1501 | 16.-.C;73.A.- | 1.074075162 | 0.613495205 |
| 8066659 | 1502 | 74.T.-;132.G.C | 1.073725216 | 0.262916351 |
| 4265165 | 1503 | 4.T.-;99.-.G | 1.07334647 | 0.742133576 |
| 8212888 | 1504 | 86.-.C;132.G.T | 1.071784689 | 0.489573855 |
| 10532402 | 1505 | 15.-.T;88.GA.-C | 1.071101998 | 0.564708496 |
| 2897244 | 1506 | 1.-.C;81.GA.-T | 1.07106925 | 0.381005159 |
| 2274809 | 1507 | 0.T.-;98.-.T | 1.071006931 | 0.70160388 |
| 3584484 | 1508 | 2.-.A;76.GG.-C | 1.070634794 | 0.859304506 |
| 12115802 | 1509 | 2.A.-;75.CG.-A | 1.070285621 | 0.735963692 |
| 3349186 | 1510 | 2.A.G;0.T.-;66.CT.-G | 1.06950253 | 0.942756466 |
| 3314448 | 1511 | 0.T.-;2.A.G;82.A.-84. | 1.069109584 | 0.669577854 |
| | | A.T | | |
| 2882882 | 1512 | 1.-.C;76.GG.-A | 1.068897247 | 0.641235084 |
| 8112365 | 1513 | 132.G.C;76.-.A | 1.068484818 | 0.642427564 |
| 8118289 | 1514 | 76.GG.-C;131.A.C | 1.067607855 | 0.671530402 |
| 2684538 | 1515 | 0.T.-2.A.C132.G.C | 1.067511236 | 0.29169754 |
| 3305808 | 1516 | 2.A.G;0.T.-;86.C.- | 1.067367495 | 0.81480322 |
| 12141962 | 1517 | 2.A.-;98.-.A | 1.06684638 | 0.768887059 |
| 8629287 | 1518 | 66.CT.-G;87.-.A | 1.066757603 | 0.520708474 |
| 10548927 | 1519 | 15.-.T;84.-.G | 1.066135811 | 0.948733575 |
| 12437589 | 1520 | 1.TAC.---;78.-.C. | 1.066060316 | 1.009600092 |
| 8494451 | 1521 | 76.-.G;87.-.G | 1.065178507 | 0.356343345 |
| 8148054 | 1522 | 76.G.-;87.-.G | 1.064941808 | 0.413919716 |
| 2684598 | 1523 | 0.T.-;2.A.C;133.A.C | 1.064210221 | 0.264316583 |
| 1806606 | 1524 | -3.TAGT.----;76.G.- | 1.063373097 | 0.955312128 |
| 6112609 | 1525 | 14.-.A;76.G.- | 1.062684812 | 0.689632914 |
| 8128619 | 1526 | 75.-.C;132.G.T | 1.062529409 | 0.341411659 |
| 2263869 | 1527 | 0.T.-;85.-.G | 1.062153729 | 1.016617311 |
| 8519538 | 1528 | 76.GG.-T;131.A.C | 1.061496162 | 0.210300359 |
| 15167837 | 1529 | -29.A.G;78.A.- | 1.061156026 | 0.246892291 |
| 8539891 | 1530 | 113.A.C;75.-.G | 1.061040443 | 0.379626895 |
| 6110621 | 1531 | 14.-.A;75.-.A | 1.060284727 | 0.621027153 |
| 4012102 | 1532 | 3.-.C;76.GG.-A | 1.059255634 | 1.031842175 |
| 14644765 | 1533 | - | 1.058597553 | 0.329942143 |
| | | 29.A.C;0.T.-;2.A.C;76 | | |
| | | .GG.-A | | |
| 6114928 | 1534 | 14.-.A;87.-.A | 1.058454656 | 0.885887929 |
| 1858781 | 1535 | 0.TT.--;87.-.T | 1.058406061 | 0.825333202 |
| 10090936 | 1536 | 19.-.T;75.CG.-T | 1.055554876 | 0.65945615 |
| 2002673 | 1537 | 0.TTA.---;86.-.C | 1.055214988 | 0.912819901 |
| 1937274 | 1538 | 0.TT.--;2.A.C;76.-.A | 1.054745159 | 0.766113106 |
| 1946930 | 1539 | 2.A.C;0.TT.--;73.AT.- | 1.053796386 | 1.042376689 |
| | | G | | |
| 8564806 | 1540 | 75.CG.-T;121.C.A | 1.053601658 | 0.274429264 |
| 14646874 | 1541 | - | 1.053406381 | 0.59545095 |
| | | 29.A.C;0.T.-;2.A.C78 | | |
| | | .A.- | | |
| 3279449 | 1542 | 2.A.G;0.T.-;86.-.A | 1.052984275 | 0.589481391 |
| 10183929 | 1543 | 18.-.G;79.G.- | 1.052474243 | 0.657984499 |
| 4281239 | 1544 | 4.T.-;83.-.G | 1.052428885 | 0.86399563 |
| 8636987 | 1545 | 66.CT.-G;87.-.T | 1.051957568 | 0.462896567 |
| 2684414 | 1546 | 129.C.A;2.A.C;0.T.- | 1.050747476 | 0.311891892 |
| 10567800 | 1547 | 15.-.T;70.-.T | 1.050309671 | 0.621437389 |
| 12183487 | 1548 | 2.A.-;77.GA.--;83.A.T | 1.049084957 | 0.987091579 |
| 3429655 | 1549 | 0.T.-;2.A.G;19.-.T | 1.048854899 | 0.495285429 |
| 15168064 | 1550 | -29.A.G;76.-.G | 1.047823892 | 0.302363264 |
| 8579268 | 1551 | 73.A.C | 1.047594299 | 0.683277383 |
| 12725378 | 1552 | 0.-.T;86.-.A | 1.047411001 | 0.365860881 |
| 12133179 | 1553 | 2.A.-;85.TC.-- | 1.046943252 | 0.820385361 |
| 12169171 | 1554 | 2.A.-;87.C.T | 1.046922375 | 0.599814315 |
| 1974530 | 1555 | 0.T.C;74.-.G | 1.045406007 | 0.681746678 |
| 3276852 | 1556 | 2.A.G;0.T.-;81.GA.-C | 1.045355433 | 0.975208443 |
| 2277126 | 1557 | 0.T.-;91.A.-;93.A.G | 1.044132704 | 0.955042692 |
| 2668148 | 1558 | 0.T.-;2.A.C;80.-.A | 1.043324984 | 0.586273368 |
| 1946365 | 1559 | 0.TT.--;2.A.C;74.-.T | 1.042813973 | 1.040869889 |
| 10086224 | 1560 | 19.-.T;78.AG.-C | 1.042716835 | 0.735960104 |
| 6474902 | 1561 | 16.-.C;78.AG.-C | 1.042498444 | 0.502799595 |
| 3001790 | 1562 | 1.TA.--;77.-.C | 1.042102465 | 0.683500309 |
| 6463023 | 1563 | 16.-.C;89.-.A | 1.041885948 | 0.829735162 |
| 8470293 | 1564 | 78.-.C;132.G.T | 1.041802211 | 0.300184554 |
| 3134206 | 1565 | 1.T.G;3.C.- | 1.041152356 | 0.79291182 |
| 10203551 | 1566 | 18.-.G;66.CT.-G | 1.039956878 | 0.786827483 |
| 8629503 | 1567 | 66.CT.-G;86.-.C | 1.039159805 | 0.369657454 |
| 13846013 | 1568 | -14.A.C;76.G.- | 1.038294775 | 0.247154929 |
| 2263715 | 1569 | 0.T.-;85.TC.-G | 1.038283386 | 0.801663086 |
| 10560681 | 1570 | 15.-.T;78.A.T | 1.037822098 | 0.677021869 |
| 1253221 | 1571 | -15.T.G;75.CG.-T | 1.037675362 | 0.212533654 |
| 10556907 | 1572 | 15.-.T;78.AG.-C | 1.037273554 | 1.01979448 |
| 3319204 | 1573 | 0.T.-;2.A.G;77.GA.- | 1.035671503 | 0.978042547 |
| | | -;83.A.T | | |
| 2277677 | 1574 | 0.T.-;91.AA.-G | 1.035145434 | 0.944699856 |
| 3044097 | 1575 | 1.TA.--;65.GC.-T | 1.033908393 | 0.776681137 |
| 2728986 | 1576 | 0.T.-;2.A.C76.GG.- | 1.033146947 | 0.961151984 |
| | | -;78.A.T | | |
| 15059527 | 1577 | - | 1.032618019 | 0.530633171 |
| | | 29.A.G;0.T.-;2.A.C;75 | | |
| | | .-.G | | |
| 8127925 | 1578 | 75.-.C121.C.A | 1.031822771 | 0.245553704 |
| 8069875 | 1579 | 74.T.-;87.-.G | 1.031655887 | 0.582873666 |
| 4210905 | 1580 | 4.T.-;66.CT.-A | 1.031653511 | 0.842224225 |
| 393375 | 1581 | -27.C.A;0.T.-;2.A.C | 1.031022939 | 0.248514229 |
| 6469193 | 1582 | 16.-.C;88.-.G | 1.030464034 | 0.735892666 |
| 12723788 | 1583 | 0.-.T;77.GA.-- | 1.02991096 | 0.435853484 |
| 1975104 | 1584 | 0.T.C;75.-.C | 1.029831571 | 0.578621416 |
| 447486 | 1585 | -27.C.A;74.-.T | 1.029567827 | 0.222259337 |
| 2304326 | 1586 | 0.T.-;73.A.T | 1.028839146 | 0.531317588 |
| 8480805 | 1587 | 78.A.-;132.G.T | 1.028699655 | 0.24544604 |
| 10289207 | 1588 | 17.-.T;89.-.A | 1.026291461 | 0.760292997 |
| 10541758 | 1589 | 15.-.T;99.-.G | 1.025988854 | 0.736311706 |
| 8580639 | 1590 | 73.-TC.G-- | 1.025947068 | 0.358873945 |
| 2129400 | 1591 | 0.TTA.-- | 1.025918395 | 1.011043018 |
| | | -;3.C.G.74.-.T | | |
| 8142671 | 1592 | 76.G.-;128.T.G | 1.025910634 | 0.290060081 |
| 12726231 | 1593 | 0.-.T;88.G.- | 1.025634121 | 0.405083637 |
| 10288957 | 1594 | 17.-.T;88.GA.-C | 1.025294913 | 0.60244436 |
| 2982939 | 1595 | 1.TA.--;65.GC.-A | 1.024519789 | 0.854258194 |
| 8357852 | 1596 | 87.-.G;133.A.C | 1.024422549 | 0.266728008 |
| 6626305 | 1597 | 18.C.-;76.-.G | 1.023762958 | 0.940900038 |
| 15167605 | 1598 | -29.A.G;78.-.C | 1.023529076 | 0.227603078 |
| 3273923 | 1599 | 2.A.G;0.T.-;79.G.- | 1.021930112 | 0.761031763 |
| 10553626 | 1600 | 15.-.T;82.AA.-T | 1.019809642 | 0.843756794 |
| 3029129 | 1601 | 1.TA.--;78.A.C | 1.018314726 | 0.493342655 |
| 3133667 | 1602 | 1.T.G;3.C.-;76.G.- | 1.018063645 | 0.663755989 |
| 14921066 | 1603 | -29.A.C;2.A.-;78.A.- | 1.01768547 | 0.653829676 |
| 14806598 | 1604 | -29.A.C;88.-.T | 1.01731078 | 0.326928264 |
| 8139512 | 1605 | 115.T.G;76.G.- | 1.017267726 | 0.260385137 |
| 8636794 | 1606 | 66.CT.-G;86.C.- | 1.016727519 | 0.223982922 |
| 8127584 | 1607 | 75.-.C;119.C.A | 1.016622667 | 0.257590784 |
| 4311933 | 1608 | 4.T.-;73.-.G | 1.015685468 | 0.722112585 |
| 6471359 | 1609 | 16.-.C;83.-.C | 1.01562419 | 0.689800797 |
| 12433542 | 1610 | 1.TAC.---;77.GA.-- | 1.015490193 | 0.963013214 |
| 8093303 | 1611 | 75.-.A;132.G.C | 1.014481628 | 0.287331894 |
| 1246761 | 1612 | -15.T.G;75.-.C | 1.013809204 | 0.244509289 |
| 1943763 | 1613 | 0.TT.--;2.A.C;82.AA.- | 1.01333782 | 0.875914657 |
| | | T | | |
| 4158980 | 1614 | 4.T.-;16.-.C | 1.012370327 | 0.730848589 |
| 8470306 | 1615 | 78.-.C;131.A.C | 1.011978039 | 0.268703426 |
| 8069089 | 1616 | 74.T.-;98.-.T | 1.011870417 | 0.753778629 |
| 12438882 | 1617 | 1.TAC.---;75.CG.-T | 1.011591105 | 0.646464747 |
| 8338521 | 1618 | 89.AT.-G | 1.01013237 | 0.921901816 |
| 10088951 | 1619 | 19.-.T;76.-.T | 1.009998244 | 0.995271538 |
| 12163085 | 1620 | 2.A.-;89.A.C | 1.009951212 | 1.005859847 |
| 8479927 | 1621 | 78.A.-;121.C.A | 1.007731759 | 0.198019758 |
| 10196772 | 1622 | 18.-.G;78.A.C | 1.007451686 | 0.605771645 |
| 8552295 | 1623 | 75.C.-;87.-.G | 1.006469896 | 0.446050968 |
| 4027916 | 1624 | 3.-.C;74.-.T | 1.006243971 | 0.88765081 |
| 8489338 | 1625 | 76.-.G;119.C.A | 1.005065199 | 0.338308183 |
| 446968 | 1626 | -27.C.A;76.GG.-T | 1.005048486 | 0.187310862 |
| 2049927 | 1627 | 0.TT.--;2.A.G;88.G.- | 1.004518203 | 0.953193053 |
| 8598621 | 1628 | 70.-.T;87.-.G | 1.004188688 | 0.382729413 |
| 8600573 | 1629 | 73.A.-;86.-.C | 1.004072362 | 0.368500944 |
| 8473900 | 1630 | 78.A.C | 1.003342068 | 0.272291839 |
| 12174360 | 1631 | 2.A.-;83.-.C | 1.002121947 | 0.61218072 |
| 442458 | 1632 | -27.C.A;76.G.- | 1.000814752 | 0.255096372 |
| 15162537 | 1633 | -29.A.G;86.-.C | 0.999559775 | 0.511729714 |
| 2991036 | 1634 | 1.TA.--;72.-.C | 0.998951084 | 0.524247852 |
| 8489557 | 1635 | 76.-.G;120.C.A | 0.998819409 | 0.234587818 |
| 2704195 | 1636 | 0.T.-;2.A.C;84.A.G | 0.998758579 | 0.779291093 |
| 12746931 | 1637 | 0.-.T;78.AG.-T | 0.998623067 | 0.694500161 |
| 8544289 | 1638 | 75.-.G;86.-.G | 0.998103804 | 0.329574932 |
| 8490052 | 1639 | 76.-.G;126.C.A | 0.998093656 | 0.284212266 |
| 3003857 | 1640 | 1.TA.--;81.GA.-C | 0.997215707 | 0.622492253 |
| 2683589 | 1641 | 0.T.-;2.A.C;121.C.A | 0.996781493 | 0.258997418 |
| 8565256 | 1642 | 75.CG.-T;129.C.A | 0.995682253 | 0.263828668 |
| 2684649 | 1643 | 0.T.-;2.A.C;131.A.C | 0.99524259 | 0.271694246 |
| 10192242 | 1644 | 18.-.G88.-.T | 0.995235176 | 0.989010874 |
| 8128468 | 1645 | 75.-.C;129.C.A | 0.994697493 | 0.26199099 |
| 3255338 | 1646 | 2.A.G;0.T.-;72.-.C | 0.994393387 | 0.842137355 |
| 7829410 | 1647 | 55.-.G;75.-.C | 0.994082042 | 0.859909204 |
| 15162331 | 1648 | -29.A.G;87,-.A | 0.993077228 | 0.690696181 |
| 8212834 | 1649 | 86.-.C;132.G.C | 0.991782036 | 0.466773251 |
| 13222300 | 1650 | 2.A.G;-3.TAGT.--- | 0.991302063 | 0.722815444 |
| | | -;76.G.- | | |
| 8470255 | 1651 | 78.-.C;132.G.C | 0.990938343 | 0.219379454 |
| 2661937 | 1652 | 132.G.C;2.A.C;0.T.-;7 | 0.989945596 | 0.389653762 |
| | | 6.G.- | | |
| 2670761 | 1653 | 0.T.-;2.A.C;85.TCC.-- | 0.989731739 | 0.7195275 |
| | | - | | |
| 11776916 | 1654 | 2.-.C;87.-.A | 0.989233941 | 0.938218378 |
| 12747759 | 1655 | 0.-.T;77.-.T | 0.989194317 | 0.937953146 |
| 15165085 | 1656 | -29.A.G;86.C.- | 0.987044987 | 0.176311237 |
| 8212745 | 1657 | 86.-.C;129.C.A | 0.987010247 | 0.50896412 |
| 2989789 | 1658 | 1.TA.--;72.-.A | 0.986062777 | 0.659043613 |
| 6531564 | 1659 | 17.-.G;87.-.T | 0.985471522 | 0.962121285 |
| 12436169 | 1660 | 1.TAC.---;87.-.G | 0.984379414 | 0.678230211 |
| 3311127 | 1661 | 2.A.G;0.T.-;82.A.- | 0.983849984 | 0.759053343 |
| 2264270 | 1662 | 0.T.-;86.CC.-A | 0.983283085 | 0.774791896 |
| 10091719 | 1663 | 19.-.T;73.AT.-G | 0.982030918 | 0.402281056 |
| 8143233 | 1664 | 76.G.-;123.A.C | 0.98195845 | 0.225973301 |
| 1248077 | 1665 | -15.T.G;86.-.C | 0.981472735 | 0.61947878 |

TABLE 18

| | SEQ | | | |
|---|---|---|---|---|
| index | ID NO | muts_1indexed | MI | 95% CI |
| 12716866 | 1666 | 0.-.T;74.T.- | 0.980705762 | 0.501255257 |
| 3303133 | 1667 | 2.A.G;0.T.-;89.-.C | 0.980281754 | 0.929335139 |
| 9974910 | 1668 | 19.-.G;76.GG.-C | 0.980161229 | 0.702243506 |
| 8143415 | 1669 | 76.G.-;122.A.C | 0.979878321 | 0.246975709 |
| 1981670 | 1670 | 0.T.C;74.-.T | 0.979604036 | 0.59020272 |
| 2302384 | 1671 | 0.T.-;73.AT.-G | 0.978319856 | 0.564838423 |
| 1809039 | 1672 | -3.TAGT.----;78.A.- | 0.978230395 | 0.8011754 |
| 13139359 | 1673 | -I .G.-;2.A.C | 0.97786126 | 0.274956142 |
| 8538659 | 1674 | 75.-.G;122.A.C | 0.977608955 | 0.391570629 |
| 2651461 | 1675 | 0.T.-;2.A.C;74.T.G | 0.976860498 | 0.581709587 |
| 3028256 | 1676 | 1.TA.--;79.GA.-T | 0.976555598 | 0.767447405 |
| 444970 | 1677 | -27.C.A;87.-.G | 0.976499126 | 0.225151793 |
| 2271218 | 1678 | 132.G.T;0.T.- | 0.976357981 | 0.375657527 |
| 13101059 | 1679 | -1.GT.--;76.-.G | 0.97610403 | 0.319731571 |
| 15169928 | 1680 | -29.A.G;75.CG.-T | 0.976070783 | 0.275722437 |
| 6454149 | 1681 | 16.-.C;72.-.C | 0.975765291 | 0.471747331 |
| 8519506 | 1682 | 76.GG.-T;133.A.C | 0.975539914 | 0.183246169 |
| 1936400 | 1683 | 0.TT.--;2.A.C;74.T.- | 0.974896363 | 0.971225863 |
| 8363289 | 1684 | 87.-.T;132.G.T | 0.974823104 | 0.348800323 |
| 14646928 | 1685 | - | 0.974746731 | 0.273309529 |
| | | 29.A.C;0.T.-;2.A.C;76 | | |
| | | .-.G | | |
| 8212907 | 1686 | 86.-.C;131.A.C | 0.974581449 | 0.469863402 |
| 13097486 | 1687 | -1.GT.--;75.-.C | 0.974076361 | 0.347126982 |
| 3272148 | 1688 | 2.A.G;0.T.-;77.-.A | 0.973879721 | 0.592128628 |
| 8557995 | 1689 | 74.-.T;121.C.A | 0.973241728 | 0.209831785 |
| 8142576 | 1690 | 76.G.-;127.T.G | 0.972909535 | 0.375025867 |
| 14816291 | 1691 | -29.A.C;73.A.- | 0.971570292 | 0.231631239 |
| 10080185 | 1692 | 19.-.T89.-.C | 0.971142172 | 0.564636407 |
| 1904247 | 1693 | 0.TTA.-- | 0.970129816 | 0.748872279 |
| | | -;3.C.A;75.-.A | | |
| 6460821 | 1694 | 16.-.C;77.GA.-- | 0.969553741 | 0.637403652 |
| 12738126 | 1695 | 0.-.T;87.-.T | 0.968376883 | 0.57825455 |
| 8357730 | 1696 | 87.-.G;129.C.A | 0.968242916 | 0.269738584 |
| 12187919 | 1697 | 2.A.-;79.GA.-T | 0.968227596 | 0.963113501 |
| 14644862 | 1698 | - | 0.967299952 | 0.512413817 |
| | | 29.A.C;0.T.-;2.A.C;76 | | |
| | | .GG.-C | | |
| 13101334 | 1699 | -1.GT.--;76.GG.-T | 0.96664163 | 0.377178934 |
| 12437308 | 1700 | 1.TAC.---;80.A.- | 0.966358793 | 0.932816051 |
| 2672055 | 1701 | 0.T.-;2.A.C;86.C.A | 0.965996878 | 0.590376536 |
| 6304109 | 1702 | 16.-.A;76.GG.-C | 0.965683364 | 0.67187653 |
| 12214091 | 1703 | 2.A.-;73.A.T | 0.965610539 | 0.601810119 |
| 8511126 | 1704 | 76.6.-;78.AG.TC | 0.96509303 | 0.453545301 |
| 10473646 | 1705 | 16.C.-;76.GG.-T | 0.964836691 | 0.499237417 |
| 8561622 | 1706 | 74.-.T;82.A.- | 0.964731122 | 0.36234088 |
| 1981516 | 1707 | 0.T.C;75.C.- | 0.964349838 | 0.525063892 |
| 4300894 | 1708 | 4.T.-;77.G.T | 0.964207177 | 0.235903819 |
| 8084158 | 1709 | 74.-.G | 0.964116495 | 0.401532934 |
| 8096194 | 1710 | 75.-.A;87.-.T | 0.96360779 | 0.605413084 |
| 2281085 | 1711 | 0.T.-;87.C.T | 0.960523556 | 0.675358848 |
| 8063355 | 1712 | 74.T.-;86.-.C | 0.959756198 | 0.506555584 |
| 3038327 | 1713 | 1.TA.--;73.-.G | 0.9591209 | 0.853900434 |
| 9976817 | 1714 | 19.-.6;79.G.- | 0.958047025 | 0.737140085 |
| 13223005 | 1715 | 2.A.G;-3.TAGT.---- | 0.95795641 | 0.837056459 |
| 8542589 | 1716 | 75.-.6;98.-.T | 0.956947885 | 0.875376914 |
| 3345006 | 1717 | 0.T.-;2.A.G;73.A.T | 0.956723708 | 0.792775096 |
| 4217628 | 1718 | 4.T.-71.-.C | 0.956428726 | 0.494530665 |
| 10068711 | 1719 | 19.-.T;76.-.A | 0.955838642 | 0.689148232 |
| 10198139 | 1720 | 18.-.G;77.-.T | 0.95550711 | 0.662670415 |
| 2463484 | 1721 | 1.TA.--;3.C.A;87.-.T | 0.955371341 | 0.695396423 |
| 8490228 | 1722 | 76.-.6;128.T.G | 0.954993055 | 0.304520889 |
| 3322121 | 1723 | 0.T.-;2.A.G;80.AG.-T | 0.954883244 | 0.811714067 |
| 2458850 | 1724 | 1.TA.--;3.C.A;79.G.- | 0.954552438 | 0.857655704 |
| 6626017 | 1725 | 18.C.-;78.A.- | 0.954491633 | 0.61106783 |
| 8519520 | 1726 | 76.GG.-T;132.G.T | 0.954300925 | 0.281109543 |
| 1974653 | 1727 | 0.T.C;75.-.A | 0.954106906 | 0.489641158 |
| 2683428 | 1728 | 120.C.A;2.A.C;0.T.- | 0.953944451 | 0.252838081 |
| 4272200 | 1729 | 4.T.-;89.A.G | 0.953838275 | 0.924709618 |
| 8193481 | 1730 | 85.TC.-G | 0.952706766 | 0.701420781 |
| 6557686 | 1731 | 18.C.A;75.-.6 | 0.952635001 | 0.330369879 |
| 1860902 | 1732 | 0.TT.--;81.GA.-T | 0.952197311 | 0.514937583 |
| 2717874 | 1733 | 2.A.C;0.T.-;80.AG.-T | 0.951134819 | 0.611248832 |
| 2882024 | 1734 | 1.-.C;74.-.G | 0.950794893 | 0.618759103 |
| 3273132 | 1735 | 0.T.-;2.A.G;77.-.C | 0.95078631 | 0.397420244 |
| 441958 | 1736 | -27.C.A;76.GG.-A | 0.949448345 | 0.20486145 |
| 14811390 | 1737 | -29.A.C;78.A.- | 0.94924455 | 0.249151979 |
| 14802094 | 1738 | -29.A.C;86.-.C | 0.948918554 | 0.461499664 |
| 10523926 | 1739 | 15.-.T;76.-.A | 0.947880548 | 0.738861592 |
| 12742835 | 1740 | 0.-.T;81.GA.-T | 0.947825709 | 0.382500139 |
| 8093342 | 1741 | 75.-.A;133.A.C | 0.9477337 | 0.326505247 |
| 8490265 | 1742 | 76.-.G;129.C.A | 0.947716798 | 0.322105698 |
| 2412848 | 1743 | 1.-.A;76.-.T | 0.946977536 | 0.632308747 |
| 8183422 | 1744 | 85.TC.-A | 0.946704814 | 0.637809088 |
| 2463159 | 1745 | 1.TA.--;3.C.A;88.-.T | 0.945816148 | 0.551604962 |
| 8490433 | 1746 | 76.-.G,133.A.C | 0.94580569 | 0.317798446 |
| 2681222 | 1747 | 0.T.-;2.A.C;115.T.G | 0.945774394 | 0.287825585 |
| 8480741 | 1748 | 78.A.-;132.G.C | 0.945726636 | 0.201668102 |
| 2663534 | 1749 | 0.T.-;2.A.C;77.G.C | 0.945544637 | 0.860590156 |
| 8118132 | 1750 | 76.GG.-C;129.C.A | 0.94554045 | 0.373219502 |
| 6447398 | 1751 | 16.-.C;55.-.G | 0.945124875 | 0.768017164 |
| 2285156 | 1752 | 0.T.-;82.AA.-- | 0.94485704 | 0.502663519 |
| 8117520 | 1753 | 76.GG.-C;120.C.A | 0.944641128 | 0.413143505 |
| 8603147 | 1754 | 73.A.- | 0.944568512 | 0.225126189 |
| 8537609 | 1755 | 75.-.G;124.T.G | 0.944260148 | 0.365887334 |
| 2245955 | 1756 | 0.T.-;71.-.C | 0.944003192 | 0.683639716 |
| 8161116 | 1757 | 79.G.- | 0.942231169 | 0.264000452 |
| 8536998 | 1758 | 75.-.G;119.C.A | 0.941935837 | 0.370421962 |
| 8537871 | 1759 | 75.-.G;127.T.C | 0.941385669 | 0.333998494 |
| 8543767 | 1760 | 75.-.G;89.A.- | 0.94098922 | 0.627842945 |
| 6603080 | 1761 | 18.C.-;55.-.G | 0.940735855 | 0.707170754 |
| 13850293 | 1762 | -14.A.C;87.-.G | 0.939872328 | 0.218040413 |
| 1852615 | 1763 | 0.TT.--;76.-.A | 0.938499355 | 0.749884292 |
| 8208020 | 1764 | 88.G.-;132.G.C | 0.937909946 | 0.241574819 |
| 14918769 | 1765 | -29.A.C;2.A.-;76.GG.- | 0.937331761 | 0.352937114 |
| | | A | | |
| 8223161 | 1766 | 90.-.G | 0.936749506 | 0.664179652 |
| 2684123 | 1767 | 0.T.-;2.A.C;126.C.A | 0.935869575 | 0.26198456 |
| 2883487 | 1768 | 1.-.C;76.GG.-C | 0.934458485 | 0.884247882 |
| 8089075 | 1769 | 75.-C.AA | 0.934377668 | 0.299006427 |
| 13746840 | 1770 | -13.G.T;76.G.- | 0.934356994 | 0.266092099 |
| 10179608 | 1771 | 18.-.G;73.-.A | 0.933175531 | 0.586679061 |
| 8357113 | 1772 | 87.-.G;119.C.A | 0.933166453 | 0.238401775 |
| 2570963 | 1773 | 0.T.-;2.A.C;18.C.- | 0.93209533 | 0.403512556 |
| 6621548 | 1774 | 18.C.-;88.-.T | 0.931719159 | 0.702372684 |
| 8543544 | 1775 | 75.-.G;89.-.C | 0.93026646 | 0.330984722 |
| 8158269 | 1776 | 79.G.A | 0.928207937 | 0.859645581 |
| 3341556 | 1777 | 2.A.G;0.T.-;73.AT.-G | 0.928088432 | 0.857493258 |
| 2683151 | 1778 | 119.C.A;2.A.C;0.T.- | 0.927519705 | 0.28783831 |
| 8543919 | 1779 | 75.-.G;88.-.T | 0.925629705 | 0.543254506 |
| 2570189 | 1780 | 0.T.-;2.A.C;18.-.A | 0.925537001 | 0.64491759 |
| 4015474 | 1781 | 3.-.C;86.-.C | 0.925505786 | 0.838123078 |
| 2731496 | 1782 | 0.T.-;2.A.C;75.-.G;132 | 0.92511208 | 0.518018242 |
| | | .G.C | | |
| 8480834 | 1783 | 78.A.-;131.A.C | 0.925032194 | 0.257034431 |
| 3011827 | 1784 | 1.TA.-- | 0.923354091 | 0.387659338 |
| 8592843 | 1785 | 70.-.T;86.-.C | 0.923182623 | 0.500818269 |
| 8057655 | 1786 | 73.-.A | 0.923159152 | 0.547314306 |
| 8480787 | 1787 | 78.A.-;133.A.C | 0.922523853 | 0.246503981 |
| 2249456 | 1788 | 0.T.-;72.-.G | 0.922153962 | 0.819512544 |
| 8752628 | 1789 | 55.-.T;76.GG.-A | 0.92194028 | 0.502766206 |
| 2274200 | 1790 | 0.T.-;99.-.T | 0.92135973 | 0.847745604 |
| 8142972 | 1791 | 76.G.-;131.A.C;133.A. | 0.921146739 | 0.257676388 |
| | | C | | |
| 1252489 | 1792 | -15.T.G;76.GG.-T | 0.920958972 | 0.235680049 |
| 14822468 | 1793 | -29.A.C;55.-.T | 0.920816801 | 0.523726671 |
| 8357890 | 1794 | 87.-.G;131.A.C | 0.920798886 | 0.274644926 |
| 8485265 | 1795 | 76.-.G;88.G.- | 0.919513147 | 0.452533222 |
| 14796763 | 1796 | -29.A.C;74.-.C | 0.919493708 | 0.375134959 |
| 14796493 | 1797 | -29.A.C;74.T.- | 0.919211892 | 0.248759572 |
| 8558538 | 1798 | 74.-.T;133.A.C | 0.918860846 | 0.281318049 |
| 7247803 | 1799 | 27.-.C;86.CC.-G | 0.917956151 | 0.914761883 |
| 10073442 | 1800 | 19.-.T;88.GA.-C | 0.917769495 | 0.551828645 |
| 12133660 | 1801 | 2.A.-;85.TC.-G | 0.917554718 | 0.915961511 |
| 2572420 | 1802 | 0.T.-;2.A.C;19.-.A | 0.917245463 | 0.557634742 |
| 8555076 | 1803 | 74.-.T;88.G.- | 0.915485429 | 0.37741171 |
| 10607377 | 1804 | 16.C.T;75.-.G | 0.915305946 | 0.788886753 |
| 3281290 | 1805 | 2.A.G;0.T.-;88.G.- | 0.915191522 | 0.698541574 |
| 12713711 | 1806 | 0.-.T;72.-.A | 0.915132536 | 0.659473807 |
| 15408234 | 1807 | -30.C.G;0.T.-;2.A.C | 0.914828105 | 0.291008919 |
| 12722990 | 1808 | 0.-.T;79.G.- | 0.91469203 | 0.498534564 |
| 8105716 | 1809 | 76.GG.-A;132.G.T | 0.913542774 | 0.274934966 |
| 2271180 | 1810 | 0.T.- | 0.913216156 | 0.38072164 |
| 10289412 | 1811 | 17.-.T;90.-.G | 0.912848775 | 0.695466523 |
| 14807090 | 1812 | -29.A.C;87.-.T | 0.912395361 | 0.448815242 |
| 6108421 | 1813 | 14.-.A;72.-.C | 0.910081852 | 0.862648242 |
| 8141461 | 1814 | 76.G.-;119.C.A | 0.909297819 | 0.26332282 |
| 14350324 | 1815 | -25.A.C;76.-.C | 0.908340852 | 0.329528677 |
| 8538185 | 1816 | 130.-- | 0.906159692 | 0.420876967 |
| | | T.TAG;133.A.G;75.-. | | |
| | | G | | |
| 8538491 | 1817 | 75.-.G;123.A.C | 0.905622339 | 0.359184365 |
| 14292135 | 1818 | -25.A.C;0.T.-;2.A.C | 0.905462839 | 0.25526538 |
| 2399779 | 1819 | 1.-.A;75.-.C | 0.903712317 | 0.626250944 |
| 8142947 | 1820 | 76.G.-;131.AG.CC | 0.90278584 | 0.311578165 |
| 8603195 | 1821 | 73.A.-;131.A.C | 0.90153794 | 0.229442208 |
| 3329015 | 1822 | 2.A.G;0.T.-;78.-.T | 0.901071633 | 0.635158992 |
| 2457498 | 1823 | 1.TA.--;3.C.A;76.-.A | 0.90086193 | 0.877512785 |
| 14799938 | 1824 | -29.A.C;76.G.-;78.A.C | 0.900781085 | 0.250085624 |
| 10194359 | 1825 | 18.-.G;82.AA.-- | 0.900734628 | 0.723199799 |
| 2461767 | 1826 | 1.TA.--;3.C.A;99.-.G | 0.897938893 | 0.891247375 |
| 8128631 | 1827 | 75.-.C;131.AG.CC | 0.897742 | 0.298470213 |
| 6130904 | 1828 | 14.-.A;75.CG.-T | 0.897627082 | 0.808841286 |
| 2885480 | 1829 | 1.-.C;77.GA.-- | 0.896880771 | 0.563534094 |

TABLE 19

| index | SEQ ID NO | muts_lindexed | MI | 95% CI |
|---|---|---|---|---|
| 8565409 | 1830 | 131.A.C;75.CG.-T | 0.896200168 | 0.289353432 |
| 8526599 | 1831 | 76.-.T;133.A.C | 0.894753435 | 0.367051671 |
| 8542268 | 1832 | 75.-.G;99.-.G | 0.894634843 | 0.466299591 |
| 3296935 | 1833 | 0.T.-;2.A.G;98.-.T | 0.894142418 | 0.818628527 |
| 8535676 | 1834 | 115.T.G;75.-.G | 0.892450762 | 0.386408997 |
| 8530925 | 1835 | 75.-.G;82.-.A | 0.890548634 | 0.434402987 |
| 8142901 | 1836 | 76.G.-;134.G.T | 0.890248996 | 0.290204128 |
| 8142383 | 1837 | 76.G.-;125.T.G | 0.890028915 | 0.343416459 |
| 2054253 | 1838 | 0.TT.--;2.A.G;87.-.T | 0.889830012 | 0.871702087 |
| 8001281 | 1839 | 71.T.C | 0.887843685 | 0.608229078 |
| 6366788 | 1840 | 17.-.A;86.C.- | 0.887689243 | 0.797295445 |
| 12123821 | 1841 | 2.A.-;76.G.-;131.A.C | 0.886864617 | 0.302511684 |
| 15159066 | 1842 | -29.A.G;74.T.- | 0.88641859 | 0.227937789 |
| 10072842 | 1843 | 19.-.T;87.-.A | 0.886327606 | 0.611907237 |
| 1979426 | 1844 | 0.T.C;80.A.- | 0.885687199 | 0.575980831 |
| 10193667 | 1845 | 18.-.G;82.A.- | 0.885623931 | 0.827650358 |
| 1252039 | 1846 | -15.T.G;76.-.G | 0.885300041 | 0.316383221 |
| 4247573 | 1847 | 4.T.-;87.C.A | 0.885192731 | 0.526496586 |
| 6110295 | 1848 | 14.-.A;74.-.G | 0.883738665 | 0.833212815 |
| 6369429 | 1849 | 17.-.A;76.-.T | 0.883709542 | 0.672045707 |
| 6476407 | 1850 | 16.-.C;78.-.T | 0.883206478 | 0.612248822 |
| 2309043 | 1851 | 0.T.-;65.GC.-T | 0.88279209 | 0.648679211 |
| 10084280 | 1852 | 19.-.T;82.AA.-G | 0.882507854 | 0.749546575 |
| 2884850 | 1853 | 1.-.C;76.G.-;78.A.C | 0.881622675 | 0.491993778 |
| 2347258 | 1854 | 0.T.-;19.-.G | 0.879771208 | 0.615653289- |
| 12737110 | 1855 | 0.-.T;88.-.T | 0.879524619 | 0.357187729 |
| 10557558 | 1856 | 15.-.T;78.A.C | 0.878879263 | 0.710410533 |
| 1851901 | 1857 | 0.TT.--;74.-.G | 0.878121046 | 0.824086218 |
| 6621723 | 1858 | 18.C.-;86.C.- | 0.877071062 | 0.845236443 |
| 10567449 | 1859 | 15.-.T;73.A.G | 0.876199614 | 0.489297254 |
| 1863878 | 1860 | 0.TT.--;75.C.- | 0.876141036 | 0.766200413 |
| 7832261 | 1861 | 55.-.G;132.G.C | 0.875938665 | 0.806722857 |
| 15161180 | 1862 | -29.A.G;77.-.A | 0.875136509 | 0.216285884 |
| 8545164 | 1863 | 75.-.G;82.AA.-G | 0.875109059 | 0.568849243 |
| 7830386 | 1864 | 55.-.G;86.-.C | 0.874746244 | 0.74436841 |
| 6077749 | 1865 | 15.TC.-A;76.G.- | 0.874549453 | 0.859375029 |
| 8148008 | 1866 | 76.G.-;86.C.- | 0.87452541 | 0.186643953 |
| 2278635 | 1867 | 0.T.-;88.-.G | 0.873679439 | 0.724828094 |
| 1041817 | 1868 | -17.C.A;75.-.C | 0.873464925 | 0.245618671 |
| 2465231 | 1869 | 1.TA.--;3.C.A;82.AA.-T | 0.87288341 | 0.829692031 |
| 2266703 | 1870 | 0.T.-;90.-.G | 0.87219304 | 0.862449293 |
| 6625678 | 1871 | 18.C.-;78.-.C | 0.871854232 | 0.579835472 |
| 8136927 | 1872 | 76.G.-;86.-.C | 0.871633528 | 0.49310448 |
| 8093375 | 1873 | 75.-.A;131.A.C | 0.870605371 | 0.334695171 |
| 2454809 | 1874 | 1.TA.--;3.C.A;72.-.A | 0.870104785 | 0.7360795 |
| 1980576 | 1875 | 0.T.C;76.GG.-T | 0.870084283 | 0.466063377 |
| 2271158 | 1876 | 0.T.-;132.G.C | 0.869968206 | 0.382593755 |
| 442251 | 1877 | -27.C.A;75.-.C | 0.869789461 | 0.272812946 |
| 2350399 | 1878 | 0.T.-;18.-.G | 0.869175589 | 0.556109447 |
| 8498008 | 1879 | 78.A.G | 0.868791572 | 0.35574229 |
| 8080600 | 1880 | 74.-.G;86.-.C | 0.868096002 | 0.559804248 |
| 3328595 | 1881 | 2.A.G;0.T.-;78.AG.-T | 0.86801762 | 0.823575147 |
| 8467079 | 1882 | 78.AG.-C | 0.867519598 | 0.422260229 |
| 6459918 | 1883 | 16.-.C;77.-.A | 0.866086899 | 0.523207502 |
| 2265855 | 1884 | 0.T.-;88.GA.-C | 0.865179979 | 0.720694826 |
| 15161451 | 1885 | -29.A.G;79.G.- | 0.864880911 | 0.291402918 |
| 8565376 | 1886 | 75.CG.-T;133.A.C | 0.8647622 | 0.308122333 |
| 2684676 | 1887 | 0.T.-;2.A.C;131.A.G | 0.864125602 | 0.347136817 |
| 6461858 | 1888 | 16.-.C;86.-.A | 0.863837493 | 0.610729582 |
| 3011807 | 1889 | 1.TA.--;132.G.C | 0.863489882 | 0.395655463 |
| 1905700 | 1890 | 0.TTA.---;3.C.A;86.-.C | 0.86299387 | 0.79224794 |
| 8440297 | 1891 | 81.GAA.-TT | 0.862721887 | 0.410012308 |
| 8752800 | 1892 | 55.-.T;75.-.C | 0.862228765 | 0.546437409 |
| 12721020 | 1893 | 0.-.T75.-.C | 0.861994689 | 0.449429098 |
| 441780 | 1894 | -27.C.A;75.-.A | 0.861287307 | 0.299642761 |
| 10070497 | 1895 | 19.-.T;76.G.-;78.A.C | 0.861054294 | 0.561313263 |
| 8112403 | 1896 | 76.-.A;132.G.T | 0.860916867 | 0.583979668 |
| 1002534 | 1897 | -17.C.A;2.A.C;0.T.- | 0.860899766 | 0.227341425 |
| 3324612 | 1898 | 0.T.-;2.A.G;78.A.C | 0.86070632 | 0.73672108 |
| 3030912 | 1899 | 1.TA.--;78.A.-80.A.- | 0.860647782 | 0.838049368 |
| 10182195 | 1900 | 1 8.-.G;76.GG.-C | 0.860369871 | 0.461905865 |
| 8519380 | 1901 | 76.GG.-T;129.C.A | 0.860233343 | 0.206775628 |
| 8493521 | 1902 | 76.-.G;98.-.T | 0.859090878 | 0.735056688 |
| 8128428 | 1903 | 75.-.C;128.T.G | 0.857937673 | 0.24073509 |
| 1248006 | 1904 | -15.T.G;88.G.- | 0.856727 | 0.216712076 |
| 5585921 | 1905 | 10.T.C;76.G.- | 0.855093855 | 0.370550678 |
| 6127219 | 1906 | 14.-.A;78.A.- | 0.854883422 | 0.492926654 |
| 3007558 | 1907 | 1.TA.--;90.-.G | 0.854495024 | 0.711184832 |
| 10555821 | 1908 | 15.-.T;80.AG.-T | 0.854328412 | 0.84308171 |
| 12747339 | 1909 | 0.-.T;78.A.T | 0.853746444 | 0.745239398 |
| 14344892 | 1910 | -25.A.C;75.-.C | 0.853497099 | 0.295843322 |
| 10310038 | 1911 | 17.-.T;77.-.T | 0.853123635 | 0.646582684 |
| 4303315 | 1912 | 4.T.-;76.G.T | 0.851550244 | 0.664150686 |
| 14786751 | 1913 | -29.A.C;55.-.G | 0.851205863 | 0.737068985 |
| 15059318 | 1914 | -29.A.G;0.T.-;2.A.C;76.-.G | 0.851092115 | 0.284707875 |
| 15240190 | 1915 | -29.A.G;2.A.- | 0.850701999 | 0.499567732 |
| 6468525 | 1916 | 16.-.C;91.A.-;93.A.G | 0.848737138 | 0.651993977 |
| 2826831 | 1917 | 0.T.-;2.A.C;15.-.T;75.-.G | 0.848656876 | 0.523377407 |
| 8212871 | 1918 | 86.-.C;133.A.C | 0.848086579 | 0.669274383 |
| 3318144 | 1919 | 2.A.G;0.T.-;82.AA.-T | 0.847571377 | 0.741743097 |
| 1246180 | 1920 | -15.T.G;75.-.A | 0.847453607 | 0.337281833 |
| 1982591 | 1921 | 0.T.C;66.CT.-G | 0.84737962 | 0.441751749 |
| 15166880 | 1922 | -29.A.G;81.GA.-T | 0.847298283 | 0.253268693 |
| 1904171 | 1923 | 0.TTA.---;3.C.A;74.-.G | 0.845851242 | 0.783342801 |
| 14635061 | 1924 | -29.A.C;0.T.- | 0.845517511 | 0.38153428 |
| 8565091 | 1925 | 75.CG.-T;126.C.A | 0.845432049 | 0.207160773 |
| 2725821 | 1926 | 0.T.-;2.A.C;77.GA.--;80.A.T | 0.845151363 | 0.836702777 |
| 4259960 | 1927 | 4.T.-;130.T.G | 0.844420024 | 0.799710867 |
| 3135495 | 1928 | 1.T.G;3.C.-;75.-.G | 0.844345159 | 0.791310505 |
| 14345120 | 1929 | -25.A.C;76.G.- | 0.844207275 | 0.259459942 |
| 10071193 | 1930 | 19.-.T;81.G.- | 0.84366427 | 0.779495237 |
| 6476304 | 1931 | 16.-.C;78.AG.-T | 0.843608449 | 0.660829712 |
| 15175052 | 1932 | -29.A.G;55.-.T | 0.843589728 | 0.628713279 |
| 8519203 | 1933 | 76.GG.-T;126.C.A | 0.843115863 | 0.232539946 |
| 8173991 | 1934 | 77.GA.-- | 0.842982504 | 0.382878127 |
| 12746208 | 1935 | 0.-.T;76.-.G | 0.842187941 | 0.434677576 |
| 8133056 | 1936 | 75.-.C;87.-.T | 0.842005477 | 0.419078021 |
| 8526626 | 1937 | 76.-.T;131.A.0 | 0.841499516 | 0.222806303 |
| 1252968 | 1938 | -15.T.G;75.C.- | 0.840541627 | 0.361088873 |
| 14646713 | 1939 | -29.A.C;0.T.-;2.A.C;80.A.- | 0.840363457 | 0.512884706 |
| 6304778 | 1940 | 16.-.A;77.-.A | 0.839744987 | 0.461935208 |
| 8479746 | 1941 | 78.A.-;120.C.A | 0.838428917 | 0.292810002 |
| 12763666 | 1942 | 0.-.T;55.-.T | 0.838009445 | 0.783484132 |
| 2684656 | 1943 | 0.T.-;2.A.C;131.A.C;133.A.C | 0.837560227 | 0.206667086 |
| 14800177 | 1944 | -29.A.C;79.G.- | 0.837044741 | 0.233067105 |
| 8128118 | 1945 | 75.-.C;124.T.G | 0.836600946 | 0.256117965 |
| 13797685 | 1946 | -14.A.C;0.T.-;2.A.C | 0.836119439 | 0.249533999 |
| 4259801 | 1947 | 4.T.-;128.T.G | 0.836000745 | 0.762544053 |
| 6612829 | 1948 | 18.C.-;76.G.- | 0.833297918 | 0.707704073 |
| 448172 | 1949 | -27.C.A;73.A.- | 0.833152564 | 0.215681899 |
| 1246589 | 1950 | -15.T.G;76.GG.-C | 0.832838095 | 0.560142043 |
| 14796144 | 1951 | -29.A.C;73.-.A | 0.832196458 | 0.441116469 |
| 6611642 | 1952 | 18.C.-;76.GG.-A | 0.831495777 | 0.704158939 |
| 3040392 | 1953 | I .TA.--;73.A.T | 0.83125454 | 0.517209585 |
| 1938331 | 1954 | 0.TT.--;2.A.C;79.G.- | 0.83094649 | 0.782892584 |
| 10528065 | 1955 | 15.-.T;79.GA.-C | 0.830823439 | 0.713061332 |
| 3261986 | 1956 | 0.T.-;2.A.G;74.T.G | 0.82985054 | 0.735935966 |
| 8131593 | 1957 | 75.-.C;99.-.G | 0.829803923 | 0.552794831 |
| 14255597 | 1958 | -24.G.T;2.A.- | 0.829521014 | 0.569520648 |
| 14879001 | 1959 | -29.A.C;15.-.T;75.-.G | 0.829471291 | 0.804622726 |
| 14918841 | 1960 | -29.A.C;2.A.-;76.GG.-C | 0.829132035 | 0.731668707 |
| 2290589 | 1961 | 0.T.-;79.GA.-T | 0.828939315 | 0.726137312 |
| 2951795 | 1962 | 1.TA.--;16.-.0 | 0.828708264 | 0.305967101 |
| 9987799 | 1963 | 19.-.G;86.-.G | 0.827168874 | 0.730661257 |
| 15455726 | 1964 | -30.C.G;78.A.- | 0.827064513 | 0.282392503 |
| 14812695 | 1965 | -29.A.C;77.-.T | 0.826064557 | 0.574798815 |
| 8202480 | 1966 | 87.-.A;131.A.C | 0.825480268 | 0.570499479 |
| 8066107 | 1967 | 74.T.-;121.C.A | 0.824741856 | 0.204192194 |
| 14807234 | 1968 | -29.A.C;86.-.G | 0.823713381 | 0.173705555 |
| 10085211 | 1969 | 19.-.T;80.A.- | 0.823514146 | 0.633352874 |
| 8180233 | 1970 | 81.GA.-C | 0.823411608 | 0.427874666 |
| 1044371 | 1971 | -17.C.A;87.-.G | 0.821282659 | 0.292542788 |
| 10286908 | 1972 | 17.-.T;85.TC.-A | 0.821041632 | 0.501681072 |
| 10250881 | 1973 | 18.C.T;75.-.G | 0.820021901 | 0.593154858 |
| 2463586 | 1974 | 1.TA.--;3.0 A;86.-.G | 0.819988929 | 0.682384778 |
| 6554412 | 1975 | 18.C.A;76.G.- | 0.819014386 | 0.317795095 |
| 8485725 | 1976 | 76.-.G;98.-.A | 0.818075053 | 0.715764322 |
| 2271237 | 1977 | 0.T.-;131.A.C | 0.817142113 | 0.351930761 |
| 2564816 | 1978 | 0.T.-;2.A.C;17.-.A | 0.81646896 | 0.601217336 |
| 8357229 | 1979 | 87.-.G;120.C.A | 0.816184189 | 0.328957228 |
| 12747630 | 1980 | 0.-.T;76.G.-;78.A.T | 0.815905287 | 0.796115745 |
| 9972115 | 1981 | 19.-.G;73.-.A | 0.815790669 | 0.80208701 |
| 8212329 | 1982 | 86.-.C;121.C.A | 0.815247299 | 0.51423849 |
| 14654311 | 1983 | -29.A.C;1.TA.--;76.G.- | 0.815105862 | 0.379590045 |
| 1864798 | 1984 | 0.TT.--;73.AT.-G | 0.814459875 | 0.762293984 |
| 8117352 | 1985 | 76.GG.-C;119.C.A | 0.812998633 | 0.432977601 |
| 8479512 | 1986 | 78.A.-;119.C.A | 0.812335411 | 0.223689176 |
| 8133372 | 1987 | 75.-.C;82.A.- | 0.812332278 | 0.356824998 |
| 10468894 | 1988 | 16.C.-;87.-.G | 0.812035912 | 0.666965245 |
| 8489702 | 1989 | 76.-.G;121.C.A | 0.811977229 | 0.335430162 |
| 14919783 | 1990 | -29.A.C;2.A.- | 0.811812719 | 0.51274018 |
| 8198335 | 1991 | 86.C.A | 0.811151507 | 0.799145123 |
| 8105698 | 1992 | 76.GG.-A;133.A.C | 0.810854998 | 0.269366495 |
| 13845556 | 1993 | -14.A.C;76.GG.-C | 0.809202243 | 0.490618124 |
| 3011864 | 1994 | 1.TA.--;132.G.T | 0.80898504 | 0.35238499 |

TABLE 20

| | SEQ | | | |
|---|---|---|---|---|
| index | ID NO | muts_1indexed | MI | 95% CI |
| 13222066 | 1995 | 2.A.G;-3.TAGT.--- | 0.808611561 | 0.596822595 |
| | | -;76.GG.-A | | |
| 6471171 | 1996 | 16.-.C;82.A.- | 0.808494016 | 0.510086271 |
| 8526572 | 1997 | 132.G.C;76.-.T | 0.807564936 | 0.259100497 |
| 8352868 | 1998 | 86.C.-;131.A.C | 0.806885397 | 0.22636509 |
| 10198068 | 1999 | 18.-.G;76.G.-;78.A.T | 0.806835867 | 0.435582585 |
| 8137025 | 2000 | 76.G.-;89.-.A | 0.803563673 | 0.538455612 |
| 8629413 | 2001 | 66.CT.-G;88.G.- | 0.803450388 | 0.32031914 |
| 8105428 | 2002 | 76.GG.-A;126.C.A | 0.803147022 | 0.24041185 |
| 7947397 | 2003 | 66.CT.-A;87.-.G | 0.802024989 | 0.362070069 |
| 7835793 | 2004 | 55.-.G;76.GG.-T | 0.801885567 | 0.735401291 |
| 8140338 | 2005 | 76.G.-;116.T.G | 0.801593594 | 0.30577562 |
| 12722736 | 2006 | 0.-.T;77.-.C | 0.801221765 | 0.426859099 |
| 8757065 | 2007 | 55.-.T;86.C.- | 0.800987285 | 0.558821092 |
| 2398681 | 2008 | 1.-.A;75.-.A | 0.800763412 | 0.641433179 |
| 4011043 | 2009 | 3.-.C;74.-.C | 0.79937771 | 0.713346067 |
| 14920334 | 2010 | -29.A.C;2.A.-;86.C.- | 0.799161613 | 0.459738042 |
| 13845318 | 2011 | -14.A.C;76.GG.-A | 0.799099794 | 0.18794716 |
| 3427589 | 2012 | 0.T.-;2.A.G;19.-.G | 0.79900678 | 0.415960568 |
| 14806422 | 2013 | -29.A.C;89.A.- | 0.798118013 | 0.702122527 |
| 15165304 | 2014 | -29.A.G;87.-.T | 0.796830943 | 0.463308646 |
| 2125941 | 2015 | 0.TTA.-- | 0.796565821 | 0.79076485 |
| | | -;3.C.G;89.A.- | | |
| 15168973 | 2016 | -29.A.G;76.-.T | 0.796128601 | 0.380420766 |
| 8538239 | 2017 | 75.-.G;131.AG.CC | 0.795805651 | 0.429399788 |
| 8528721 | 2018 | 76.GGA.-TT | 0.795594742 | 0.447243511 |
| 7834109 | 2019 | 55.-.G;86.-.G | 0.794446595 | 0.595594758 |
| 8476335 | 2020 | 78.A.-;98.-.A | 0.793884665 | 0.527904732 |
| 8352802 | 2021 | 132.G.C;86.C.- | 0.793673627 | 0.214217899 |
| 10372832 | 2022 | 18.CA.-T;74.-.T | 0.793649001 | 0.724009478 |
| 8752727 | 2023 | 55.-.T;76.GG.-C | 0.792864878 | 0.681485029 |
| 6460172 | 2024 | 16.-.C;77.-.C | 0.792492284 | 0.473521838 |
| 1245743 | 2025 | -15.T.G;74.T.- | 0.792248453 | 0.347003397 |
| 6469515 | 2026 | 16.-.C88.-.T | 0.791786541 | 0.64480155 |
| 15241028 | 2027 | -29.A.G;2.A.-;78.A.- | 0.791581969 | 0.398369648 |
| 2711056 | 2028 | 0.T.-;2.A.C;82.A.G | 0.791084203 | 0.74717295 |
| 1974296 | 2029 | 0.T.C;74.T.- | 0.790042405 | 0.532969357 |
| 8637058 | 2030 | 66.CT.-G;86.-.G | 0.789170768 | 0.254255894 |
| 8526611 | 2031 | 76.-.T;132.G.T | 0.788188081 | 0.322643284 |
| 8144153 | 2032 | 76.G.-;119.C.T | 0.788021877 | 0.239807981 |
| 10566620 | 2033 | 15.-.T;73.A.C | 0.787853854 | 0.613069845 |
| 8557775 | 2034 | 74.-.T;119.C.A | 0.787787618 | 0.230477012 |
| 8462867 | 2035 | 79.GA.-T | 0.787274361 | 0.613395387 |
| 8549438 | 2036 | 75.C.- | 0.7872713 | 0.425057254 |
| 8558414 | 2037 | 74.-.T;129.C.A | 0.787235849 | 0.254942799 |
| 8105581 | 2038 | 76.GG.-A;129.C.A | 0.787085201 | 0.25915294 |
| 2281703 | 2039 | 0.T.-;86.C.T | 0.785739149 | 0.719182131 |
| 2400499 | 2040 | 1.-.A;76.G.-;78.A.C | 0.785147179 | 0.482179072 |
| 14920368 | 2041 | -29.A.C;2.A.-;87.-.G | 0.784869833 | 0.602095885 |
| 8543253 | 2042 | 75.-.G;91.A.-;93.A.G | 0.784852363 | 0.451551966 |
| 8488707 | 2043 | 76.-.G;116.T.G | 0.784670342 | 0.282512341 |
| 9979217 | 2044 | 19.-.G;86.-.C | 0.783235694 | 0.61177765 |
| 15162226 | 2045 | -29.A.G;86.-.A | 0.782740907 | 0.521792231 |
| 12146137 | 2046 | 2.A.-;116.T.G | 0.782680959 | 0.42917569 |
| 5454231 | 2047 | 8.G.C;76.G.- | 0.782380772 | 0.6463104 |
| 2288382 | 2048 | 0.T.-;77.GA.--;83.A.T | 0.781480078 | 0.648018195 |
| 8549424 | 2049 | 75.C.-;132.G.C | 0.781281893 | 0.386040689 |
| 6461529 | 2050 | 16.-.C;85.T.- | 0.781254783 | 0.720080877 |
| 1090544 | 2051 | 2.A.- | 0.781168584 | 0.530340013 |
| 2282648 | 2052 | 0.T.-;84.-.T | 0.779234454 | 0.667414229 |
| 12149194 | 2053 | 2.A.-;131.A.G | 0.778932674 | 0.43969611 |
| 8142223 | 2054 | 76.G.-;124.T.G | 0.778900279 | 0.273194276 |
| 8199575 | 2055 | 86.CC.-A | 0.77887351 | 0.610550764 |
| 13854291 | 2056 | -14.A.C;75.CG.-T | 0.778830352 | 0.362088557 |
| 8092813 | 2057 | 75.-.A;121.C.A | 0.778421275 | 0.281031479 |
| 8605540 | 2058 | 73.A.-;87.-.G | 0.778324817 | 0.302912081 |
| 68946 | 2059 | 0.T.-;2.A.C | 0.778217999 | 0.249763093 |
| 12199248 | 2060 | 2.A.-;76.GG.- | 0.778119212 | 0.423790052 |
| | | T;132.G.C | | |
| 8093073 | 2061 | 126.C.A75.-.A | 0.777970506 | 0.369671349 |
| 12149170 | 2062 | 2.A.-;131.A.C | 0.776491674 | 0.526766214 |
| 447600 | 2063 | -27.C.A;75.CG.-T | 0.776402867 | 0.266208398 |
| 8143156 | 2064 | 76.G.-;126.C.T | 0.776218375 | 0.345711065 |
| 1982252 | 2065 | 0.T.C;73.A.- | 0.776212517 | 0.440987509 |
| 4255522 | 2066 | 4.T.-;115.T.G | 0.776114871 | 0.763967165 |
| 8112417 | 2067 | 76.-.A;131.A.C | 0.776058906 | 0.677356656 |
| 8083653 | 2068 | 74.-.G121.C.A | 0.775457064 | 0.433721449 |
| 8539008 | 2069 | 75.-.G120.C.T | 0.775033077 | 0.360907809 |
| 13750813 | 2070 | -13.G.T;75.-.G | 0.773597076 | 0.496364906 |
| 8759144 | 2071 | 55.-.T;76.GG.-T | 0.77186309 | 0.578448287 |
| 2684637 | 2072 | 0.T.-;2.A.C;131.AG.C | 0.771368384 | 0.250615124 |
| | | C | | |
| 8032414 | 2073 | 72.-.C | 0.770653538 | 0.299141231 |
| 15165408 | 2074 | -29.A.G;86.-.G | 0.770467267 | 0.132165451 |
| 8352728 | 2075 | 86.C.-;129.C.A | 0.769563809 | 0.199735436 |
| 12191702 | 2076 | 2.A.-;78.A.-;131.A.C | 0.768623982 | 0.496502512 |
| 12751144 | 2077 | 0.-.T;74.-.T | 0.76856622 | 0.416724498 |
| 2894079 | 2078 | 1.-.C;87.-.G | 0.76797859 | 0.69721306 |
| 8480622 | 2079 | 78.A.-;129.C.A | 0.767578125 | 0.331587077 |
| 8758901 | 2080 | 55.-.T;76.-.G | 0.766343494 | 0.641541627 |
| 8202090 | 2081 | 87.-.A;121.C.A | 0.766102496 | 0.622079897 |
| 2885067 | 2082 | 1.-.C;79.G.- | 0.765626173 | 0.51214927 |
| 8202431 | 2083 | 87.-.A;132.G.C | 0.765077306 | 0.53718099 |
| 12191659 | 2084 | 2.A.-;78.A.-;132.G.C | 0.764704817 | 0.595721144 |
| 12149115 | 2085 | 2.A.-;133.A.C | 0.764324854 | 0.438594709 |
| 2271200 | 2086 | 0.T.-;133.A.C | 0.763753757 | 0.4294745 |
| 2252404 | 2087 | 0.T.-;74.T.G | 0.763452663 | 0.476144264 |
| 8142993 | 2088 | 131.A.G;76.G.- | 0.761824261 | 0.24967661 |
| 446438 | 2089 | -27.C.A;78.A.- | 0.761792637 | 0.249126858 |
| 8480581 | 2090 | 78.A.-;128.T.G | 0.76178249 | 0.28018538 |
| 3133382 | 2091 | 1.T.G;3.C.-;74.-.G | 0.760891826 | 0.629329233 |
| 2302762 | 2092 | 0.T.-73.A.G | 0.760848385 | 0.618073183 |
| 1041081 | 2093 | -17.C.A;74.T.- | 0.760237431 | 0.229813983 |
| 1074428 | 2094 | -17.C.A;2.A.- | 0.759954307 | 0.561101375 |
| 10571409 | 2095 | 15.-.T65.GC.-T | 0.759803199 | 0.638728683 |
| 8598575 | 2096 | 70.-.T;86.C.- | 0.757656592 | 0.3746533 |
| 8363306 | 2097 | 87.-.T;131.A.C | 0.757331721 | 0.451839871 |
| 8143881 | 2098 | 76.G.-;120.C.T | 0.757192938 | 0.313345954 |
| 15159530 | 2099 | -29.A.G;74.-.G | 0.757082564 | 0.394186622 |
| 4230077 | 2100 | 4.T.-;75.C.A | 0.755983607 | 0.733464455 |
| 8146649 | 2281 | 76.G.-;99.-.G | 0.755070921 | 0.379444158 |
| 2684498 | 2282 | 0.T.-,2.A.C,130.T.G | 0.754689937 | 0.294762457 |
| 8128273 | 2283 | 75.-.C126.C.A | 0.753949302 | 0.276623271 |
| 8066406 | 2284 | 74.T.-;126.C.A | 0.751660833 | 0.236816233 |
| 8363243 | 2285 | 87.-.T;132.G.C | 0.751028711 | 0.468864036 |
| 8142864 | 2286 | 76.G.-;132.GA.CC | 0.750861564 | 0.275934907 |
| 2512825 | 2287 | 1.T.C;76.G.- | 0.7504689 | 0.48593163 |
| 8091801 | 2288 | 75.-.A;115.T.G | 0.749700204 | 0.260297227 |
| 1114939 | 2289 | -16.C.A;76.G.- | 0.749305598 | 0.263900263 |
| 8142311 | 2290 | 76.G.-;125.T.C | 0.74877691 | 0.290550934 |
| 11774438 | 2291 | 2.-.C;76.GG.-A | 0.748308714 | 0.657502587 |
| 15064284 | 2292 | -29.A.G;1.TA.-- | 0.748045422 | 0.3832171 |
| 1187746 | 2293 | -15.T.G;0.T.- | 0.748017281 | 0.384223169 |
| 8092581 | 2294 | 75.-.A;119.C.A | 0.746934248 | 0.329723696 |
| 1246493 | 2295 | -15.T.G;76.-.A | 0.746842913 | 0.493140906 |
| 14646216 | 2296 | - | 0.74668829 | 0.368724428 |
| | | 29.A.C;0.T.-;2.A.C;87 | | |
| | | .-.G | | |
| 8142526 | 2297 | 76.G.-;127.T.C | 0.74638204 | 0.249355712 |
| 8191621 | 2298 | 85.TCC.-GA | 0.745990957 | 0.478821582 |
| 10308897 | 2299 | 17.-.T;78.A.G | 0.74547438 | 0.691042832 |
| 14661314 | 2300 | - | 0.745107888 | 0.569801975 |
| | | 29.A.C;0.T.-;2.A.G;75 | | |
| | | .-.C | | |
| 8549337 | 2301 | 75.C.-;129.C.A | 0.745005935 | 0.299426299 |
| 8753061 | 2302 | 55.-.T;79.G.- | 0.744926149 | 0.513566692 |
| 10097262 | 2303 | 19.-.T;55.-.T | 0.744819737 | 0.582631114 |
| 8161158 | 2304 | 79.G.-;131.A.C | 0.743647218 | 0.214645028 |
| 2661991 | 2305 | 0.T.-;2.A.C;76.G.-;131 | 0.743411308 | 0.431940993 |
| | | .A.C | | |
| 9987131 | 2306 | 19.-.G;86.C.- | 0.74325326 | 0.684101481 |
| 1046156 | 2307 | -17.C.A;76.GG.-T | 0.742891912 | 0.206153413 |
| 3311900 | 2308 | 0.T.-;2.A.G;83.-.C | 0.742731517 | 0.541403805 |
| 2412608 | 2309 | 1.-.A;76.GG.-T | 0.7419989 | 0.454493748 |
| 8092717 | 2310 | 75.-.A;120.C.A | 0.740460814 | 0.353030203 |
| 2684366 | 2311 | 0.T.-;2.A.C;128.T.G | 0.740365485 | 0.319772226 |
| 8536239 | 2312 | 75.-.G;116.T.G | 0.739558614 | 0.409490289 |
| 8483990 | 2313 | 78.A.-;98.-.T | 0.738582774 | 0.635321715 |
| 1290147 | 2314 | -15.T.G;2.A.-;76.G.- | 0.736953498 | 0.358146051 |
| 8629656 | 2315 | 66.CT.-G;89.-.A | 0.736647742 | 0.643898592 |
| 8039677 | 2316 | 72.-.G;86.-.C | 0.736394521 | 0.628402188 |
| 8528174 | 2317 | 76.-.T;87.-.G | 0.736315801 | 0.316059266 |
| 8142772 | 2318 | 76.G.-;130.T.C | 0.735973311 | 0.349764548 |
| 12148593 | 2319 | 2.A.-;126.C.A | 0.735792991 | 0.540631906 |
| 8089812 | 2320 | 75.-.A;88.G.- | 0.735648884 | 0.621749821 |
| 8436907 | 2321 | 81.GA.-T;131.A.C | 0.734237962 | 0.289458336 |
| 6303279 | 2322 | 16.-.A;74.-.G | 0.732956994 | 0.70590626 |
| 8136856 | 2323 | 76.G.-;88.G.- | 0.732170571 | 0.393401019 |
| 13099840 | 2324 | -1.GT.--;87.-.G | 0.73213014 | 0.204923163 |
| 12147390 | 2325 | 2.A.-;119.C.A | 0.731356849 | 0.364446154 |
| 8480707 | 2326 | 78.A.-;130.T.G | 0.730801992 | 0.306613853 |
| 8145151 | 2327 | 76.G.-;113.A.C | 0.729155512 | 0.24017937 |
| 2682115 | 2328 | 116.T.G;2.A.C;0.T.- | 0.726372083 | 0.269099758 |
| 2397740 | 2329 | 1.-.A;73.-.A | 0.725232042 | 0.569675223 |
| 8477975 | 2330 | 78.A.-;115.T.G | 0.725003641 | 0.25829691 |
| 10190335 | 2331 | 18.-.G;99.-.G | 0.724967082 | 0.471801343 |
| 15456232 | 2332 | -30.C.G;76.GG.-T | 0.724648029 | 0.153274083 |
| 1191613 | 2333 | - | 0.723562149 | 0.39593116 |
| | | 15.T.G;0.T.-;2.A.C;76. | | |
| | | G.- | | |
| 8352265 | 2334 | 86.C.-;121.C.A | 0.72284596 | 0.142245465 |
| 8212804 | 2335 | 86.-.C;130.T.G | 0.721964157 | 0.480722755 |
| 8549476 | 2336 | 132.G.T;75.C.- | 0.721079989 | 0.389979571 |
| 9994620 | 2337 | I9.-.G;77-.T | 0.720984013 | 0.612544282 |
| 14350752 | 2338 | -25.A.C;76.GG.-T | 0.720650806 | 0.13185545 |
| 13099030 | 2339 | -1.GT.-- | 0.72055901 | 0.376134358 |

TABLE 21

| | SEQ | | | |
|---|---|---|---|---|
| index | ID NO | muts_1indexed | MI | 95% CI |
| 12147928 | 2340 | 2.A.-;121.C.A | 0.720545241 | 0.487545739 |
| 1253117 | 2341 | -15.T.G;74.-.T | 0.720084866 | 0.252501472 |
| 8208073 | 2342 | 88.G.-;131.A.C | 0.719133155 | 0.210050353 |
| 2684254 | 2343 | 0.T.-;2.A.C;127.T.G | 0.719036934 | 0.352679314 |
| 8154688 | 2344 | 76.G.-;78.A.C;132.G. | 0.718994464 | 0.383020798 |
| | | C | | |
| 318717 | 2345 | -28.G.C;76.G.- | 0.71885563 | 0.191720408 |
| 8142885 | 2346 | 130.-- | 0.718716342 | 0.300945926 |
| | | T.TAG;133.A.G;76.G. | | |
| | | - | | |
| 14687527 | 2347 | -29.A.C;4.T.-;78.A.- | 0.71775509 | 0.526752246 |
| 15162677 | 2348 | -29.A.G;89.-.A | 0.717702888 | 0.668207942 |
| 15450951 | 2349 | -30.C.G;76.GG.-C | 0.717140275 | 0.47685517 |
| 8405267 | 2350 | 82.AA.-- | 0.715989547 | 0.291686385 |
| 8066712 | 2351 | 74.T.-;132.G.T | 0.715629569 | 0.310262393 |
| 8112393 | 2352 | 76.-.A;133.A.C | 0.71549299 | 0.479861009 |
| 8564706 | 2353 | 75.CG.-T,120.C.A | 0.714963297 | 0.236535754 |
| 8538090 | 2354 | 75.-.G;130.T.C | 0.714585785 | 0.385707956 |
| 14081174 | 2355 | -20.A.C;76.G.- | 0.714441554 | 0.176857594 |
| 8357562 | 2356 | 87.-.G;126.C.A | 0.713356322 | 0.284696561 |
| 6476171 | 2357 | 16.-.C;78.A.G | 0.713329524 | 0.676881239 |
| 12145038 | 2358 | 2.A.-;115.T.G | 0.712513 | 0.523524776 |
| 8636717 | 2359 | 66.CT.-G;88.-.T | 0.712296212 | 0.372467895 |
| 8208060 | 2360 | 88.G.-;132.G.T | 0.712226175 | 0.261444904 |
| 2746161 | 2361 | 0.T.-;2.A.C;66.CT.- | 0.711241204 | 0.361583276 |
| | | G;132.G.0 | | |
| 8064859 | 2362 | 74.T.-;115.T.G | 0.710992569 | 0.209965515 |
| 1981797 | 2363 | 0.T.C;75.CG.-T | 0.710765302 | 0.646448886 |
| 15719823 | 2364 | -32.G.T;0.T.-;2.A.C | 0.710088606 | 0.271097621 |
| 3024059 | 2365 | 1.TA.--;82.AA.-C | 0.709917185 | 0.373332434 |
| 14806152 | 2366 | -29.A.C;89.-.C | 0.708940534 | 0.181536327 |
| 14634677 | 2367 | -29.A.C;0.T.-;76.G.- | 0.708441715 | 0.420617475 |
| 672656 | 2368 | -23.C.A;75.-.G | 0.708188696 | 0.429780424 |
| 8628797 | 2369 | 66.CT.-G;77.GA.-- | 0.707896801 | 0.333142814 |
| 10529623 | 2370 | 15.-.T;85.TC.-A | 0.70783661 | 0.506178761 |
| 10196969 | 2371 | 18.-.G;78.A.- | 0.707389309 | 0.69751051 |
| 8057272 | 2372 | 73.-.A;121.C.A | 0.707360184 | 0.369603218 |
| 13845728 | 2373 | -14.A.C;75.-.C | 0.706574477 | 0.296568536 |
| 1045822 | 2374 | -17.C.A;76.-.G | 0.706174615 | 0.323551014 |
| 10460865 | 2375 | 16.C.-;76.GG.-C | 0.705744149 | 0.522507616 |
| 4222138 | 2376 | 4.T.-;72.-.G | 0.704993477 | 0.401332431 |
| 1152457 | 2377 | -15.T.C;0.T.-;2.A.C | 0.704466347 | 0.351046476 |
| 8069945 | 2378 | 74.T.-;87.-.T | 0.70432033 | 0.402131002 |
| 6303440 | 2379 | 16.-.A;75.-.A | 0.704295633 | 0.656523061 |
| 5593794 | 2380 | 10.T.C;75.CG.-T | 0.704113278 | 0.280887784 |
| 14654654 | 2381 | -29.A.C;1.TA.-- | 0.703489272 | 0.363240543 |
| 7829345 | 2382 | 55.-.G;76.GG.-C | 0.703371081 | 0.651218332 |
| 7490581 | 2383 | 36.C.A;76.GG.-C | 0.702828956 | 0.438837246 |
| 15452184 | 2384 | -30.C.G;86.-.C | 0.702460521 | 0.465360303 |
| 8089736 | 2385 | 75.-.A;87.-.A | 0.702242786 | 0.403569437 |
| 3161365 | 2386 | 0.T.-;2.A.G;14.-.A | 0.702180409 | 0.699897723 |
| 8215458 | 2387 | 88.GA.-C | 0.702027917 | 0.285995925 |
| 2455947 | 2388 | 1.TA.--;3.C.A;73.-.A | 0.70199884 | 0.692587003 |
| 827787 | 2389 | -21.C.A;76.G.- | 0.701801158 | 0.246155238 |
| 3574182 | 2390 | 2.-.A;55.-.G | 0.70077073 | 0.681126044 |
| 8504697 | 2391 | 78.-.T | 0.700694002 | 0.457301016 |
| 8147538 | 2392 | 76.G.-;91.A.-;93.A.G | 0.700512042 | 0.391148044 |
| 8436856 | 2393 | 81.GA.-T;132.G.C | 0.700344125 | 0.19857296 |
| 8110287 | 2394 | 76.-.A;86.-.C | 0.700322656 | 0.448259352 |
| 8598693 | 2395 | 70.-.T;87.-.T | 0.699981587 | 0.315205095 |
| 4260194 | 2396 | 4.T.-;129.C.T | 0.699010018 | 0.509569637 |
| 8059622 | 2397 | 73.-.A;87.-.G | 0.698999314 | 0.388603932 |
| 8586230 | 2398 | 73.AT.-G | 0.698732941 | 0.264987891 |
| 8126524 | 2399 | 75.-.C;115.T.G | 0.698610242 | 0.336087672 |
| 10084621 | 2400 | 19.-.T;82.AA.-T | 0.698526311 | 0.642093957 |
| 10607021 | 2401 | 16.C.T;78.A.- | 0.698487586 | 0.567347419 |
| 8212230 | 2402 | 86.-.C;120.C.A | 0.698013662 | 0.50513075 |
| 2664493 | 2403 | 0.T.-;2.A.C;79.G.A | 0.698011945 | 0.639630835 |
| 2203429 | 2404 | 0.T.-;18.C.- | 0.697561122 | 0.407203853 |
| 8605503 | 2405 | 73.A.,-;86.C.- | 0.697298567 | 0.200410632 |
| 13852662 | 2406 | -14.A.C;78.A.- | 0.697272825 | 0.309315646 |
| 8546163 | 2407 | 75.C.-;86.-.C | 0.697016055 | 0.445359301 |
| 446575 | 2408 | -27.C.A;76.-.G | 0.695980214 | 0.351410771 |
| 8065997 | 2409 | 74.T.-;120.C.A | 0.695979977 | 0.233779111 |
| 11888602 | 2410 | 2.A.C;75.-.G | 0.69559201 | 0.514633776 |
| 8536608 | 2411 | 75.-.G;118.T.C | 0.693904103 | 0.323497498 |
| 14797194 | 2412 | -29.A.C;74.-.G | 0.693690739 | 0.384361164 |
| 15166776 | 2413 | -29.A.G;82.AA.-T | 0.693594042 | 0.237378116 |
| 14800643 | 2414 | -29.A.C;77.GA.-- | 0.693435682 | 0.378778787 |
| 8030604 | 2415 | 72.-.C;86.-.C | 0.692063669 | 0.344818271 |
| 2464748 | 2416 | 1.TA.--;3.C.A;82.AA.- | 0.691743005 | 0.573710339 |
| | | C | | |
| 8493269 | 2417 | 76.-.G;99.-.G | 0.691472756 | 0.355929538 |
| 8549456 | 2418 | 75.C.-;133.A.C | 0.69071559 | 0.458090894 |
| 2307776 | 2419 | 0.T.-;66.CT.-- | 0.690358826 | 0.673270196 |
| 6306305 | 2420 | 16.-.A;86.-.C | 0.690314014 | 0.602110134 |
| 8126956 | 2421 | 75.-.C;116.T.G | 0.690175397 | 0.277812588 |
| 14809754 | 2422 | -29.A.C;81.GA.-T | 0.688454834 | 0.29609246 |
| 8212714 | 2423 | 86.-.C;128.T.G | 0.687830213 | 0.369390789 |
| 1251890 | 2424 | -15.T.G;78.A.- | 0.68686342 | 0.318568855 |
| 8518607 | 2425 | 76.GG.-T;119.C.A | 0.68650775 | 0.191235812 |
| 8057702 | 2426 | 73.-.A;131.A.C | 0.686176201 | 0.431944832 |
| 3024866 | 2427 | 1.TA.--;82.AA.-G | 0.686104906 | 0.454012439 |
| 8367599 | 2428 | 86.-.G;133.A.C | 0.68587266 | 0.156982412 |
| 8431922 | 2429 | 82.AA.-T | 0.685861849 | 0.217270657 |
| 8144351 | 2430 | 76.G.-;117.G.T | 0.685412598 | 0.238848867 |
| 8538257 | 2431 | 75.-.G;131.A.C;133.A. | 0.685222941 | 0.418849067 |
| | | C | | |
| 8543064 | 2432 | 75.-.G;91.A.- | 0.684684899 | 0.640360013 |
| 15455856 | 2433 | -30.C.G;76.-.G | 0.684667278 | 0.299094636 |
| 12149015 | 2434 | 2.A.-;130.T.G | 0.684628303 | 0.459482563 |
| 2685087 | 2435 | 0.T.-;2.A.C;122.A.C | 0.68431304 | 0.234414414 |
| 8084140 | 2436 | 74.-.G;132.G.C | 0.683463073 | 0.395894389 |
| 8142757 | 2437 | 76.G.-;130.T.C;132.G. | 0.683368549 | 0.271903521 |
| | | C | | |
| 8538197 | 2438 | 75.-.G;134.G.T | 0.683303537 | 0.367656483 |
| 15058053 | 2439 | - | 0.683089038 | 0.335849266 |
| | | 29.A.G;0.T.-;2.A.C;76 | | |
| | | .GG.-C | | |
| 8066567 | 2440 | 74.T.-;129.C.A | 0.680987394 | 0.26636043 |
| 441402 | 2441 | -27.C.A;74.T.- | 0.680666111 | 0.300414617 |
| 1042785 | 2442 | -17.C.A;86.-.0 | 0.678600413 | 0.334671562 |
| 8490149 | 2443 | 76.-.G;127.T.G | 0.678408907 | 0.29278641 |
| 1905560 | 2444 | 0.TTA.-- | 0.678221748 | 0.634547551 |
| | | -;3.C.A;87.-.A | | |
| 8352170 | 2445 | 86.C.-;120.C.A | 0.678142556 | 0.182223647 |
| 1252598 | 2446 | -15.T.G;76.-.T | 0.677678067 | 0.234976145 |
| 2400384 | 2447 | 1.-.A;77.-.A | 0.677524672 | 0.355978788 |
| 8087722 | 2448 | 74.-.G;86.C.- | 0.676149479 | 0.432474934 |
| 8101522 | 2449 | 75.-C.AG | 0.67614354 | 0.285448934 |
| 8087834 | 2450 | 74.-.G;87.-.T | 0.676028279 | 0.449497639 |
| 8431908 | 2451 | 82.AA.-T;132.G.C | 0.675935187 | 0.224923092 |
| 14645411 | 2452 | - | 0.675701823 | 0.635118105 |
| | | 29.A.C;0.T.-;2.A.C;86 | | |
| | | .-.C | | |
| 2835829 | 2453 | 0.T.-;2.A.C;6.G.T | 0.674847549 | 0.297866453 |
| 8438736 | 2454 | 81.GAA.-TC | 0.674319631 | 0.36029861 |
| 8065838 | 2455 | 74.T.-;119.C.A | 0.673352621 | 0.209456007 |
| 15171004 | 2456 | -29.A,G;73.A.- | 0.67309218 | 0.259465148 |
| 8084203 | 2457 | 74.-.G;131.A.C | 0.672638793 | 0.327011811 |
| 15161712 | 2458 | -29.A.G;77.GA.-- | 0.672345803 | 0.38770658 |
| 6613064 | 2459 | 18.C.-;77.-.A | 0.672260517 | 0.550699573 |
| 12315000 | 2460 | 2.A.-;15.-.T;75.-.G | 0.672180697 | 0.634716358 |
| 14246167 | 2461 | -24.G.T;75.-.G | 0.671730114 | 0.307720749 |
| 15051656 | 2462 | -29.A.G;0.T.- | 0.67119501 | 0.366366001 |
| 8469914 | 2463 | 78.-.C;121.C.A | 0.670982816 | 0.231982774 |
| 8352836 | 2464 | 86.C.-;133.A.C | 0.670437953 | 0.207264383 |
| 8554990 | 2465 | 74.-.T;87.-.A | 0.670240877 | 0.490358551 |
| 830076 | 2466 | -21.C.A;75.-.G | 0.670218516 | 0.422319746 |
| 8538376 | 2467 | 75.-.G;126.C.G | 0.670202704 | 0.370287506 |
| 15451096 | 2468 | -30.C.G;75.-.C | 0.670027612 | 0.235695956 |
| 1290476 | 2469 | -15.T.G;2.A.- | 0.668606404 | 0.65790079 |
| 14644913 | 2470 | - | 0.667729957 | 0.334589988 |
| | | 29.A.C;0.T.-;2.A.C;75 | | |
| | | .-.C | | |
| 8481064 | 2471 | 78.A.-;123.A.C | 0.666590429 | 0.232012003 |
| 12726534 | 2472 | 0.-.T;86.-.C | 0.665708352 | 0.531149931 |
| 14814019 | 2473 | -29.A.C;75.C.- | 0.665656435 | 0.396720553 |
| 15450607 | 2474 | -30.C.G;75.-.A | 0.665082103 | 0.225224942 |
| 8512477 | 2475 | 76.G.-;78.A.T;132.G. | 0.665001481 | 0.478100918 |
| | | C | | |
| 1247921 | 2476 | -15.T.G;87.-.A | 0.664815358 | 0.476053218 |
| 6461965 | 2477 | 16.-.C;86.CC.-A | 0.663795788 | 0.62018675 |
| 14815751 | 2478 | -29.A.C;73.A.G | 0.663422519 | 0.362091839 |
| 8557906 | 2479 | 74.-.T;120.C.A | 0.663111331 | 0.196201718 |
| 8174025 | 2480 | 77.GA --;132.G.T | 0.662605083 | 0.264797557 |
| 1979872 | 2481 | 0.T.C;78.-.C | 0.662557174 | 0.404196186 |
| 8148116 | 2482 | 76.G.-;87.-.T | 0.662403165 | 0.583645084 |
| 8055441 | 2483 | 73.-.A;86.-.C | 0.662135274 | 0.470696085 |
| 15162449 | 2484 | -29.A.G;88.G.- | 0.66196323 | 0.205534263 |
| 8522485 | 2485 | 76.GGA.-TC | 0.66191775 | 0.401082807 |
| 3081068 | 2486 | 1.TA.--;18.-.G | 0.661511132 | 0.556336464 |
| 8117952 | 2487 | 76.GG.-C;126.C.A | 0.661310322 | 0.38129357 |
| 6469397 | 2488 | 16.-.C;89.-.T | 0.661127615 | 0.591422391 |
| 8181855 | 2489 | 85.TCC.-AA | 0.661004434 | 0.567631116 |
| 1044315 | 2490 | -17.C.A;86.C.- | 0.660954164 | 0.167201347 |
| 14920528 | 2491 | -29.A.C;2.A.-;82.A.- | 0.659413017 | 0.536093731 |
| 8518772 | 2492 | 76.GG.-T;120.C.A | 0.65901063 | 0.283077251 |
| 15058093 | 2493 | - | 0.658082073 | 0.434010427 |
| | | 29.A.G;0.T.-;2.A.C;75 | | |
| | | .-.C | | |
| 8057683 | 2494 | 132.G.T;73.-.A | 0.656683021 | 0.433937068 |
| 2459622 | 2495 | 1.TA.--;3.C.A;86.-.A | 0.656221452 | 0.656035224 |
| 8069836 | 2496 | 74.T.-;86.C.- | 0.655888245 | 0.292848962 |
| 3320802 | 2497 | 2.A.G;0.T.-;80.A.- | 0.655685526 | 0.611479278 |
| 14919186 | 2498 | -29.A.C;2.A.-;77.GA.- | 0.655286056 | 0.360298823 |
| 8207846 | 2499 | 88.G.-;126.C.A | 0.655096377 | 0.243604744 |
| 447068 | 2500 | -27.C.A;76.-.T | 0.65455178 | 0.227422314 |
| 8603132 | 2501 | 73.A.-;132.G.C | 0.653928447 | 0.247296366 |
| 8755264 | 2502 | 55.-.T;132.G.C | 0.653511089 | 0.548281641 |
| 443309 | 2503 | -27.C.A;86.-.C | 0.653207249 | 0.447236787 |

TABLE 22

| | SEQ | | | |
|---|---|---|---|---|
| index | ID NO | muts_lindexed | MI | 95% CI |
| 8548846 | 2504 | 75.C.-;121.C.A | 0.652717251 | 0.454635257 |
| 8150297 | 2505 | 77.-.A;132.G.T | 0.652483401 | 0.274067745 |
| 8603165 | 2506 | 73.A.-;133.A.C | 0.651995199 | 0.297596 |
| 12312790 | 2507 | 16.C.-;2.A.- | 0.651829339 | 0.523664364 |
| 10248608 | 2508 | 18.C.T;76.G.- | 0.65143407 | 0.536447137 |
| 1046713 | 2509 | -17.C.A;75.CG.-T | 0.651373242 | 0.2628061 |
| 8638044 | 2510 | 66.CT.-G;82.AA.-T | 0.651267731 | 0.286853587 |
| 3315325 | 2511 | 0.T.-;2.A.G;82.AA.-C | 0.649742268 | 0.60527814 |
| 12314014 | 2512 | 2.A.-;15.-.T;76.G.- | 0.649432547 | 0.573783459 |
| 8494400 | 2513 | 76.-.G;86.C.- | 0.649382925 | 0.187112086 |
| 14920881 | 2514 | -29.A.C;2.A.-;80.A.- | 0.648202591 | 0.517031462 |
| 14243707 | 2515 | -24.G.T;76.G.- | 0.647505918 | 0.184867776 |
| 12148911 | 2516 | 2.A.-;129.C.A | 0.646912178 | 0.60106697 |
| 12149062 | 2517 | 2.A.-132.G.C | 0.646447274 | 0.501642261 |
| 8600526 | 2518 | 73.A.-;88.G.- | 0.645193272 | 0.440415837 |
| 8538871 | 2519 | 75.-.G;121.C.T | 0.645184704 | 0.40216231 |
| 8603181 | 2520 | 73.A.-;132.G.T | 0.645084394 | 0.288944622 |
| 15450764 | 2521 | -30.C.G;76.GG.-A | 0.644258092 | 0.211001918 |
| 12149230 | 2522 | 2.A.-;129.C.G | 0.643329654 | 0.340406439 |
| 8558338 | 2523 | 74.-.T;127.T.G | 0.643068363 | 0.272440562 |
| 8367575 | 2524 | 86.-.G;132.G.C | 0.641668887 | 0.1457948 |
| 14647726 | 2525 | -29.A.C;0.T.-;2.A.C;66.CT.-G | 0.641412285 | 0.377955569 |
| 8490463 | 2526 | 76.-.G;131.AG.CC | 0.640049069 | 0.222285584 |
| 12123507 | 2527 | 2.A.-;76.G.-;121.C.A | 0.639903685 | 0.451876032 |
| 8352850 | 2528 | 86.C.-;132.G.T | 0.639565433 | 0.244789313 |
| 12191691 | 2529 | 2.A.-;78.A.-;132.G.T | 0.639118578 | 0.498911309 |
| 8638264 | 2530 | 66.CT.-G;80.A.- | 0.638943302 | 0.281775101 |
| 1195928 | 2531 | -15.T.G;1.TA.-- | 0.638864668 | 0.361194556 |
| 1979286 | 2532 | 0.T.C;81.GA.-T | 0.63859349 | 0.548201787 |
| 8207662 | 2533 | 88.G.-;121.C.A | 0.638318686 | 0.120347159 |
| 6460643 | 2534 | 16.-.C;81.G.- | 0.638310296 | 0.572206436 |
| 2686745 | 2535 | 0.T.-;2.A.C;113.A.C | 0.638107876 | 0.276224167 |
| 1045705 | 2536 | -17.C.A;78.A.- | 0.637718862 | 0.261909741 |
| 8600457 | 2537 | 73.A.-;87.-.A | 0.636224444 | 0.454199961 |
| 7948057 | 2538 | 66.CT.-A;76.-.G | 0.636173306 | 0.379844371 |
| 10091271 | 2539 | 19.-.T;73.AT.-C | 0.636047852 | 0.54205078 |
| 442030 | 2540 | -27.C.A;76.-.A | 0.636046349 | 0.591730246 |
| 844891 | 2541 | 2.A.-;-21.C.A | 0.632935206 | 0.622195627 |
| 10516019 | 2542 | 15.-.T;71.-.C | 0.632798013 | 0.533791186 |
| 12016332 | 2543 | 2.A.-;18.C.- | 0.631955982 | 0.463438076 |
| 8073253 | 2544 | 74.-.C;132.G.C | 0.631661253 | 0.355974737 |
| 8357699 | 2545 | 87.-.G;128.T.G | 0.630236239 | 0.334726151 |
| 2684905 | 2546 | 0.T.-;2.A.C;123.A.C | 0.63013769 | 0.30068044 |
| 2684593 | 2547 | 0.T.-;2.A.C;134.G.T | 0.629727119 | 0.25806889 |
| 12149142 | 2548 | 2.A.-;132.G.T | 0.629713317 | 0.481100174 |
| 2881692 | 2549 | 1.-.C;74.-.C | 0.627981095 | 0.530566104 |
| 5590003 | 2550 | 87.-.G;10.T.C | 0.627660496 | 0.470739888 |
| 12123808 | 2551 | 132.G.T;2.A.-;76.G.- | 0.627589046 | 0.327420951 |
| 8212595 | 2552 | 86.-.C;126.C.A | 0.627387867 | 0.514472305 |
| 8173470 | 2553 | 77.GA.--;121.C.A | 0.626575942 | 0.292013291 |
| 8034488 | 2554 | 72.-.C;82.A.- | 0.626551427 | 0.141402238 |
| 2411142 | 2555 | 1.-.A78.-.C | 0.626392306 | 0.400317799 |
| 8096384 | 2556 | 75.-.A;82.A.- | 0.626331195 | 0.4184413 |
| 2723173 | 2557 | 0.T.-;2.A.C;76.-.G;132.G.C | 0.626278728 | 0.31951463 |
| 8118097 | 2558 | 76.GG.-C;128.T.G | 0.625076866 | 0.405168323 |
| 8543409 | 2559 | 75.-.G;91.AA.-G | 0.624970143 | 0.399800368 |
| 14812614 | 2560 | -29.A.C;76.G.-;78.A.T | 0.624719682 | 0.41001969 |
| 6476723 | 2561 | 16.-.C;76.G.-;78.A.T | 0.624048653 | 0.568485562 |
| 8519286 | 2562 | 76.GG.-T;127.T.G | 0.623896278 | 0.239307789 |
| 8501650 | 2563 | 78.AG.-T | 0.623450189 | 0.439968264 |
| 8208050 | 2564 | 88.G.-;133.A.C | 0.623252172 | 0.206345206 |
| 8549499 | 2565 | 75.C.-;131.A.C | 0.622971653 | 0.381498008 |
| 12009703 | 2566 | 2.A.-;17.-.A | 0.62272951 | 0.617146589 |
| 8128850 | 2567 | 75.-.C;123.A.C | 0.622500225 | 0.271537384 |
| 1862825 | 2568 | 0.TT.--;78.-.T | 0.622420716 | 0.588046598 |
| 6368672 | 2569 | 17.-.A;78.-.C | 0.622294539 | 0.60729061 |
| 8519348 | 2570 | 76.GG.-T;128.T.G | 0.622179066 | 0.277414915 |
| 1041692 | 2571 | -17.C.A;76.GG.-C | 0.621568558 | 0.482033714 |
| 8018631 | 2572 | 72.-.A | 0.620704206 | 0.469244558 |
| 8066533 | 2573 | 74.T.-;128.T.G | 0.619394119 | 0.261300111 |
| 8436892 | 2574 | 81.GA.-T;132.G.T | 0.6187912 | 0.153725765 |
| 8636610 | 2575 | 66.CT.-G;89.A.- | 0.617976625 | 0.523674002 |
| 2884910 | 2576 | 1.-.C;77.-.C | 0.617324835 | 0.494013201 |
| 8143053 | 2577 | 76.G.-;129.C.T | 0.617246947 | 0.285046334 |
| 8356385 | 2578 | 87.-.G;115.T.G | 0.616275923 | 0.347649465 |
| 8561418 | 2579 | 74.-.T;87.-.T | 0.616099222 | 0.531230795 |
| 6467416 | 2580 | 16.-.C;99.-.G | 0.614592516 | 0.506581659 |
| 2723199 | 2581 | 0.T.-;2.A.C;76.-.G132.G.T | 0.614591974 | 0.388667098 |
| 13746674 | 2582 | -13.G.T;75.-.C | 0.614408274 | 0.31688527 |
| 15736191 | 2583 | -32.G.T;76.G.- | 0.613525442 | 0.181348798 |
| 2950619 | 2584 | 1.TA.--;17.T.C | 0.612573777 | 0.330320805 |
| 1250048 | 2585 | -15.T.G;87.-.G | 0.612309332 | 0.301352125 |
| 8519441 | 2586 | 76.GG.-T;130.T.G | 0.611111182 | 0.22661563 |
| 8174044 | 2587 | 77.GA.--;131.A.C | 0.610717722 | 0.367883539 |
| 8083913 | 2588 | 74.-.G;126.C.A | 0.610464009 | 0.361277358 |
| 6554290 | 2589 | 18.C.A;75.-.C | 0.610353714 | 0.248319065 |
| 8481228 | 2590 | 78.A.-;122.A.C | 0.610254061 | 0.293301542 |
| 14004700 | 2591 | -19.G.T;0.T.-;2.A.C | 0.609843143 | 0.268233428 |
| 481605 | 2592 | -27.C.A;2.A.- | 0.609754574 | 0.487237879 |
| 2262447 | 2593 | 0.T.-;81.GA.-C | 0.608367109 | 0.518060275 |
| 2683891 | 2594 | 0.T.-;2.A.C;124.T.G | 0.608299233 | 0.300466966 |
| 2685505 | 2595 | 0.T.-;2.A.C;120.C.T | 0.608011273 | 0.287147596 |
| 827692 | 2596 | -21.C.A;75.-.C | 0.607793108 | 0.315024918 |
| 13101663 | 2597 | -1.GT.--;74.-.T | 0.607364457 | 0.271699421 |
| 2271017 | 2598 | 0.T.-;128.T.G | 0.606729725 | 0.344765189 |
| 8066699 | 2599 | 74.T.-;133.A.C | 0.606568555 | 0.229285806 |
| 8118193 | 2600 | 76.GG.-C;130.T.G | 0.606502407 | 0.534475385 |
| 8073290 | 2601 | 74.-.C;132.G.T | 0.606200531 | 0.307476047 |
| 1117646 | 2602 | -16.C.A;75.-.G | 0.60596891 | 0.417438742 |
| 444910 | 2603 | -27.C.A;86.C.- | 0.604808061 | 0.1069721 |
| 8563682 | 2604 | 75.CG.-T;115.T.G | 0.604638581 | 0.20973375 |
| 14645196 | 2605 | -29.A.C;0.T.-;2.A.C;77.GA.-- | 0.604366944 | 0.450675558 |
| 14663089 | 2606 | -29.A.C;0.T.-;2.A.G;76.-.G | 0.604210237 | 0.579091661 |
| 8480843 | 2607 | 78.A.-;131.A.C;133.A.C | 0.602956995 | 0.220786526 |
| 15241063 | 2608 | -29.A.G;2.A.-;76.-.G | 0.602866438 | 0.535046196 |
| 8128359 | 2609 | 75.-.C;127.T.G | 0.60265641 | 0.24558453 |
| 12202830 | 2610 | 2.A.-;75.-.G;131.A.C | 0.6021552 | 0.300307984 |
| 2516661 | 2611 | 1.T.C;76.-.G | 0.601658638 | 0.569136768 |
| 8600854 | 2612 | 73.A.-;98.-.A | 0.601410904 | 0.554678943 |
| 15158807 | 2613 | -29.A.G;73.-.A | 0.600152864 | 0.594433328 |
| 12147720 | 2614 | 2.A.-;120.C.A | 0.600140012 | 0.523644495 |
| 14344554 | 2615 | -25.A.C;76.GG.-A | 0.599996463 | 0.212388649 |
| 3133295 | 2616 | 1.T.G;3.C.-;74.T.- | 0.599817227 | 0.540582624 |
| 3601058 | 2617 | 2.-.A;76.GG.-T | 0.599399219 | 0.520337615 |
| 8562045 | 2618 | 74.-.T;82.AA.-T | 0.59910687 | 0.25652345 |
| 8080686 | 2619 | 74.-.G;89.-.A | 0.599083728 | 0.541504936 |
| 8116266 | 2620 | 76.GG.-C;115.T.G | 0.599077745 | 0.438717053 |
| 8528148 | 2621 | 76.-.T;86.C.- | 0.597986897 | 0.267868788 |
| 14809572 | 2622 | -29.A.C;82.AA.-T | 0.597370752 | 0.168815452 |
| 1041548 | 2623 | -17.C.A;76.GG.-A | 0.597127645 | 0.347987184 |
| 13847372 | 2624 | -14.A.C;86.-.C | 0.597092285 | 0.439947956 |
| 2654872 | 2625 | 0.T.-;2.A.C;75.C.A | 0.596011018 | 0.360937483 |
| 8543705 | 2626 | 75.-.G;89.A.G | 0.595783213 | 0.480599849 |
| 8150315 | 2627 | 77.-.A;131.A.C | 0.59518379 | 0.216809566 |
| 13854171 | 2628 | -14.A.C;74.-.T | 0.59491988 | 0.255047542 |
| 8084187 | 2629 | 74.-.G;132.G.T | 0.594518766 | 0.378253331 |
| 1249988 | 2630 | -15.T.G;86.C.- | 0.594456707 | 0.263547148 |
| 10308807 | 2631 | 17.-.T;78.A.-;80.A.- | 0.593350924 | 0.537958354 |
| 8093276 | 2632 | 75.-.A;130.T.G | 0.593146278 | 0.294496621 |
| 15069677 | 2633 | -29.A.G;0.T.-;2.A.G;75.-.G | 0.5926846 | 0.429138172 |
| 2884699 | 2634 | 1.-.C;77.-.A | 0.592681567 | 0.444413531 |
| 14921605 | 2635 | -29.A.C;2.A.-;74.-.T | 0.591983792 | 0.536395035 |
| 8448153 | 2636 | 80.A.-;132.G.C | 0.591660429 | 0.174714397 |
| 8140966 | 2637 | 76.G.-;118.T.C | 0.591028328 | 0.208755316 |
| 8161100 | 2638 | 79.6.-;132.G.C | 0.590790681 | 0.220833117 |
| 15165008 | 2639 | -29.A.G;88.-.T | 0.58999307 | 0.294162942 |
| 15058006 | 2640 | -29.A.G;0.T.-;2.A.C;76.GG.-A | 0.589688255 | 0.449116705 |
| 14647360 | 2641 | -29.A.C;0.T.-;2.A.C;75.CG.-T | 0.588777864 | 0.365024825 |
| 8207961 | 2642 | 88.G.-;129.C.A | 0.588244428 | 0.254294724 |
| 2684707 | 2643 | 0.T.-;2.A.C;129.C.G | 0.58718304 | 0.249024882 |
| 12177699 | 2644 | 2.A.-;82.A.-;84.A.T | 0.58696641 | 0.577956828 |
| 8495115 | 2645 | 76.-.G;80.A.G | 0.586627596 | 0.276894747 |
| 8173741 | 2646 | 77.GA.--;126.C.A | 0.585562165 | 0.261884393 |
| 8044380 | 2647 | 72.-.G;87.-.G | 0.585537507 | 0.496438628 |
| 2270366 | 2648 | 0.T.-;120.C.A | 0.585051153 | 0.348301546 |
| 15456767 | 2649 | -30.C.G;74.-.T | 0.584964692 | 0.259355294 |
| 12752882 | 2650 | 0.-.T;73.AT.-G | 0.583581773 | 0.561012988 |
| 4217308 | 2651 | 4.T.-;71.T.C | 0.583528708 | 0.515253098 |
| 14810890 | 2652 | -29.A.C;78.AG.-C | 0.583180403 | 0.367641912 |
| 13853442 | 2653 | -14.A.C;76.GG.-T | 0.582589545 | 0.211217084 |
| 8448176 | 2654 | 80.A.- | 0.582531333 | 0.209077508 |
| 8103057 | 2655 | 76.GG.-A;98.-.A | 0.582277673 | 0.55389364 |
| 8141130 | 2656 | 76.G.-;118.T.G | 0.581284111 | 0.26198905 |
| 8133120 | 2657 | 75.-.C;86.-.G | 0.581268194 | 0.268509352 |
| 14921140 | 2658 | -29.A.C;2.A.-;76.-.G | 0.581166066 | 0.463527496 |
| 1046627 | 2659 | -17.C.A;74.-.T | 0.580843268 | 0.237913321 |
| 8490817 | 2660 | 76.-.G;122.A.C | 0.580816128 | 0.338035457 |
| 2749021 | 2661 | 0.T.-;2.A.C;65.G.T | 0.580627515 | 0.520199907 |
| 1251730 | 2662 | -15.T.G;78.-.0 | 0.580454498 | 0.277680214 |
| 8565400 | 2663 | 75.CG.-T;131.AG.CC | 0.580378421 | 0.162900123 |
| 8034315 | 2664 | 72.-.C;87.-.G | 0.579900852 | 0.400196584 |
| 1095467 | 2665 | -16.C.A;0.T.-;2.A.C | 0.578139753 | 0.253542538 |
| 1982142 | 2666 | 0.T.C;70.-.T | 0.578040747 | 0.514803955 |

TABLE 23

| | SEQ | | | |
|---|---|---|---|---|
| index | ID NO | muts_lindexed | MI | 95% CI |
| 2661968 | 2667 | 0.T.-;2.A.C;76.G.-;133.A.C | 0.57749224 | 0.441653169 |
| 14529775 | 2668 | -28.G.T;75.-.G | 0.577078051 | 0.357956174 |
| 2464540 | 2669 | 0.T.-;3.C.-;82.AA.-- | 0.576438266 | 0.496783332 |
| 3011533 | 2670 | 1.TA.--;126.C.A | 0.576212191 | 0.385876942 |
| 8160673 | 2671 | 79.G.-;121.C.A | 0.576161715 | 0.276769402 |
| 445036 | 2672 | -27.C.A;87.-.T | 0.576139586 | 0.385762845 |
| 8480668 | 2673 | 78.A.-;130.T.C | 0.576024382 | 0.239310768 |
| 446329 | 2674 | -27.C.A;78.-.C | 0.575818594 | 0.275614681 |
| 8524684 | 2675 | 76.-.T;86.-.C | 0.575418001 | 0.427849393 |
| 14350148 | 2676 | -25.A.C;78.A.- | 0.574994909 | 0.251987218 |
| 15456629 | 2677 | -30.C.G;75.C.- | 0.574735978 | 0.433262652 |
| 8084175 | 2678 | 74.-.G;133.A.C | 0.573978066 | 0.497590865 |
| 8470281 | 2679 | 78.-.C;133.A.C | 0.573588021 | 0.327243841 |
| 1976159 | 2680 | 0.T.C;88.G.- | 0.573415984 | 0.487091048 |
| 2553815 | 2681 | 0.T.-;2.A.C;11.T.C | 0.572813487 | 0.380949243 |
| 8565313 | 2682 | 75.CG.-T;130.T.G | 0.572720854 | 0.28519884 |
| 8142626 | 2683 | 76.G.-;128.T.C | 0.572573376 | 0.270734577 |
| 15059444 | 2684 | -29.A.G;0.T.-;2.A.C;76.GG.-T | 0.571014973 | 0.539165235 |
| 14349990 | 2685 | -25.A.C;78.-.C | 0.570479705 | 0.339570631 |
| 7944404 | 2686 | 66.CT.-A;86.-.C | 0.570401891 | 0.517202925 |
| 8143508 | 2687 | 76.G.-;122.A.G | 0.570368433 | 0.295091218 |
| 8483736 | 2688 | 78.A.-;99.-.G | 0.569940382 | 0.383399129 |
| 8457128 | 2689 | 80.AG.-T | 0.569875532 | 0.407717978 |
| 14685680 | 2690 | -29.A.C;4.T.-;76.GG.-C | 0.569769951 | 0.468156843 |
| 8639135 | 2691 | 66.CT.-G;75.-.G | 0.569640144 | 0.439103296 |
| 8093196 | 2692 | 75.-.A;128.T.G | 0.569631485 | 0.286483725 |
| 2574670 | 2693 | 0.T.-2.A.C;21.T.A | 0.568848291 | 0.277790817 |
| 2270511 | 2694 | 0.T.-;121.C.A | 0.568823446 | 0.346919825 |
| 2411434 | 2695 | 1.-.A;78.A.- | 0.568308397 | 0.492015937 |
| 8128649 | 2696 | 75.-.C;131.A.C;133.A.C | 0.56797398 | 0.310988199 |
| 2837903 | 2697 | 2.A.C;0.T.-;5.G.T | 0.567182668 | 0.301762792 |
| 15456872 | 2698 | -30.C.G;75.CG.-T | 0.566922487 | 0.275000232 |
| 2684575 | 2699 | 130.--T.TAG;133.A.G;2.A.C;0.T.- | 0.566786287 | 0.297282581 |
| 15486653 | 2700 | -30.C.G;2.A.- | 0.566597124 | 0.457183039 |
| 12202811 | 2701 | 2.A.-;75.-.G;133.A.C | 0.565986807 | 0.395655607 |
| 8480879 | 2702 | 78.A.-;129.C.G | 0.565951849 | 0.323772129 |
| 3011188 | 2703 | 1.TA.--;121.C.A | 0.563547027 | 0.371989823 |
| 8297879 | 2704 | 99.-.G | 0.563426918 | 0.267608562 |
| 8352639 | 2705 | 86.C.-;127.T.G | 0.563082098 | 0.202268903 |
| 14801514 | 2706 | -29.A.C;86.-.A | 0.562277455 | 0.47388314 |
| 1975537 | 2707 | 0.T.C;79.G.- | 0.562276863 | 0.48611243 |
| 8480783 | 2708 | 78.A.-;134.G.T | 0.560674716 | 0.40924491 |
| 14351204 | 2709 | -25.A.C;75.C.- | 0.56061618 | 0.404146443 |
| 1042672 | 2710 | -17.C.A;87.-.A | 0.560291693 | 0.386629447 |
| 8480385 | 2711 | 78.A.-;126.C.A | 0.56011981 | 0.238382308 |
| 8105496 | 2712 | 76.GG.-A;127.T.G | 0.559463981 | 0.268526426 |
| 15059173 | 2713 | -29.A.G;0.T.-;2.A.C;80.A.- | 0.558328951 | 0.364430265 |
| 8132470 | 2714 | 75.-.C;91.AA.-G | 0.55794057 | 0.467738717 |
| 14663399 | 2715 | -29.A.C;0.T.-;2.A.G;75.C.- | 0.555989953 | 0.452975089 |
| 8132353 | 2716 | 75.-.C;91.A.-;93.A.G | 0.555655149 | 0.391589733 |
| 6557204 | 2717 | 18.C.A;78.A.- | 0.55490577 | 0.33009122 |
| 13845080 | 2718 | -14.A.C;75.-.A | 0.553964545 | 0.280917125 |
| 2894429 | 2719 | 1.-.C;86.-.G | 0.553556726 | 0.355589983 |
| 8605594 | 2720 | 73.A.-;87.-.T | 0.553338911 | 0.323431172 |
| 14918668 | 2721 | -29.A.C;2.A.-;75.-.A | 0.553238993 | 0.285233158 |
| 13852859 | 2722 | -14.A.C;76.-.G | 0.552869618 | 0.304031476 |
| 8558273 | 2723 | 74.-.T;126.C.A | 0.552629697 | 0.203156607 |
| 14344734 | 2724 | -25.A.C;76.GG.-C | 0.552119262 | 0.424653466 |
| 8063226 | 2725 | 74.T.-;87.-.A | 0.552096685 | 0.354902882 |
| 8564564 | 2726 | 75.CG.-T;119.C.A | 0.551864161 | 0.230129505 |
| 13687669 | 2727 | -12.G.T75.-.G | 0.551148172 | 0.378236607 |
| 14812439 | 2728 | -29.A.C;78.A.T | 0.550882224 | 0.501507682 |
| 7944045 | 2729 | 66.CT.-A;76.G.- | 0.550594074 | 0.425751575 |
| 2685752 | 2730 | 0.T.-;2.A.C;119.C.T | 0.549480674 | 0.2058528 |
| 8118242 | 2731 | 130.--T.TAG;133.A.G;76.GG.-C | 0.548710279 | 0.423160468 |
| 1245577 | 2732 | -15.T.G;73.-.A | 0.548630123 | 0.53908022 |
| 15454032 | 2733 | -30.C.G;86.C.- | 0.548408194 | 0.146894103 |
| 15738375 | 2734 | -32.G.T;75.-.G | 0.548196327 | 0.30032935 |
| 6302341 | 2735 | 16.-.A;72.-.C | 0.54793736 | 0.363280011 |
| 2287278 | 2736 | 0.T.-;82.-.T | 0.547862516 | 0.435436106 |
| 3599083 | 2737 | 2.-.A;78.-.C | 0.547517977 | 0.397685932 |
| 8538303 | 2738 | 75.-.G;129.C.G | 0.547177668 | 0.446183912 |
| 3025181 | 2739 | 1.TA.--;82.-.T | 0.546005635 | 0.497627964 |
| 999582 | 2740 | -17.C.A;0.T.- | 0.545876413 | 0.406976245 |
| 9986114 | 2741 | 19.-.G;89.-.C | 0.545714579 | 0.49212709 |
| 13096860 | 2742 | -1.GT.--;74.T.- | 0.54540182 | 0.126101418 |
| 14686894 | 2743 | -29.A.C;4.T.-;86.C.- | 0.545239171 | 0.409735305 |
| 8515608 | 2744 | 76.G.-;78.AG.TT | 0.545069364 | 0.313301484 |
| 10071761 | 2745 | 19.-.T;85.TC.-A | 0.54479944 | 0.527860057 |
| 8540169 | 2746 | 75.-.G;113.A.G | 0.543102637 | 0.381475433 |
| 15170520 | 2747 | -29.A.G;73.AT.-G | 0.542963315 | 0.302212358 |
| 8133499 | 2748 | 75.-.C;83.-.G | 0.542495998 | 0.398113706 |
| 15161304 | 2749 | -29.A.G;76.G.-;78.A.C | 0.542401586 | 0.360524231 |
| 14815543 | 2750 | -29.A.C;73.AT.-G | 0.542111484 | 0.268698449 |
| 14812304 | 2751 | -29.A.C;78.-.T | 0.541883351 | 0.456256042 |
| 8351219 | 2752 | 86.C.-;115.T.G | 0.541795444 | 0.167333867 |
| 8363173 | 2753 | 87.-.T;129.C.A | 0.541710882 | 0.45548051 |
| 8128504 | 2754 | 75.-.C;130.T.C | 0.541636404 | 0.301115914 |
| 8538167 | 2755 | 75.-.G;132.GA.CC | 0.541089363 | 0.415736007 |
| 8063302 | 2756 | 74.T.-;88.G.- | 0.540731374 | 0.306571561 |
| 10087552 | 2757 | 19.-.T;78.A.-;80.A.- | 0.540592506 | 0.495589309 |
| 7490687 | 2758 | 36.C.A;76.G.- | 0.540151999 | 0.152783677 |
| 8202465 | 2759 | 87.-.A;132.G.T | 0.54005277 | 0.527499683 |
| 8519530 | 2760 | 76.GG.-T;131.AG.CC | 0.539568972 | 0.199248804 |
| 4321391 | 2761 | 4.T.-;65.G.T | 0.538942702 | 0.513208936 |
| 15239627 | 2762 | -29.A.G;2.A.-;75.-.C | 0.538937683 | 0.394383352 |
| 14808642 | 2763 | -29.A.C;82.A.-;84.A.T | 0.538835503 | 0.494127547 |
| 12123800 | 2764 | 2.A.-;76.G.-;133.A.C | 0.53867639 | 0.36512328 |
| 15169507 | 2765 | -29.A.G;75.C.- | 0.538649298 | 0.410436551 |
| 2731526 | 2766 | 0.T.-;2.A.C;75.-.G;132.G.T | 0.538312596 | 0.51810426 |
| 8118032 | 2767 | 76.GG.-C;127.T.G | 0.53700376 | 0.351634793 |
| 15168665 | 2768 | -29.A.G;77.-.T | 0.536694116 | 0.500951198 |
| 8546114 | 2769 | 75.C.-;88.G.- | 0.536531987 | 0.433499049 |
| 6480287 | 2770 | 16.-.C;73.A.G | 0.535878646 | 0.477206798 |
| 8367284 | 2771 | 86.-.G;121.C.A | 0.535296368 | 0.178941915 |
| 14245829 | 2772 | -24.G.T;78.A.- | 0.534877866 | 0.289282764 |
| 8526256 | 2773 | 76.-.T;121.C.A | 0.534562327 | 0.258036007 |
| 320895 | 2774 | -28.G.C;75.-.G | 0.533966141 | 0.338633053 |
| 14801003 | 2775 | -29.A.C;85.TC.-A | 0.533852209 | 0.42681567 |
| 2900348 | 2776 | 1.-.C;76.G.-;78.A.T | 0.533722522 | 0.476159074 |
| 8173897 | 2777 | 77.GA.--;129.C.A | 0.533268703 | 0.286973833 |
| 10315449 | 2778 | 17.-.T;73.A.G | 0.532731562 | 0.462080339 |
| 8118283 | 2779 | 76.GG.-C;131.AG.CC | 0.532401677 | 0.506645788 |
| 8638120 | 2780 | 66.CT.-G;81.GA.-T | 0.529612827 | 0.189572957 |
| 8115215 | 2781 | 76.GG.-C;98.-.A | 0.529601406 | 0.407199505 |
| 8098639 | 2782 | 75.CG.-A | 0.528065372 | 0.398201351 |
| 8363276 | 2783 | 87.-.T;133.A.C | 0.527654337 | 0.444969797 |
| 8490333 | 2784 | 76.-.G;130.T.G | 0.527134113 | 0.344258636 |
| 670332 | 2785 | -23.C.A;76.G.- | 0.526515155 | 0.335457235 |
| 14499641 | 2786 | -28.G.T;0.T.-;2.A.C | 0.52630839 | 0.192014079 |
| 8357643 | 2787 | 87.-.G;127.T.G | 0.526215994 | 0.313357684 |
| 4269759 | 2788 | 4.T.-;91.A.-;93.A.G | 0.526142398 | 0.366589265 |
| 8145628 | 2789 | 76.G.-;113.A.G | 0.525564142 | 0.316731543 |
| 1250181 | 2790 | -15.T.G;86.-.G | 0.525481067 | 0.170826111 |
| 2684458 | 2791 | 0.T.-;2.A.C;130.T.C | 0.524709128 | 0.229934214 |
| 8211364 | 2792 | 86.-.C;115.T.G | 0.524286326 | 0.484460897 |
| 12327615 | 2793 | 2.A.-;6.G.T | 0.523903903 | 0.498314675 |
| 13750639 | 2794 | -13.G.T;76.GG.-T | 0.52360612 | 0.199695415 |
| 8545256 | 2795 | 75.-.G;82.AA.-T | 0.523533206 | 0.310507673 |
| 15051403 | 2796 | -29.A.G;0.T.-;76.G.- | 0.523477863 | 0.359359453 |
| 8128996 | 2797 | 75.-.C;122.A.C | 0.52294617 | 0.295511794 |
| 15157689 | 2798 | -29.A.G;72.-.A | 0.522828828 | 0.3905261 |
| 3011885 | 2799 | 1.TA.--;131.A.C | 0.522211145 | 0.412727331 |
| 6586124 | 2800 | 18.-.A;73.AT.-C | 0.521721358 | 0.392610894 |
| 8538269 | 2801 | 75.-.G;131.A.G | 0.521700337 | 0.380171958 |
| 2661660 | 2802 | 0.T.-;2.A.C;76.G.-;121.C.A | 0.52050173 | 0.428916241 |
| 8490491 | 2803 | 76.-.G;131.A.G | 0.520366526 | 0.267501834 |
| 8638542 | 2804 | 66.CT.-G;78.-.C | 0.519761904 | 0.367445975 |
| 14230312 | 2805 | -24.G.T;0.T.-;2.A.C | 0.519671019 | 0.345673439 |
| 6554102 | 2806 | 18.C.A;76.GG.-A | 0.519352035 | 0.207450089 |
| 8480490 | 2807 | 78.A.-;127.T.G | 0.519219321 | 0.21628878 |
| 12148735 | 2808 | 2.A.-;127.T.G | 0.518903576 | 0.454392832 |
| 6554952 | 2809 | 18.C.A;86.-.C | 0.518790459 | 0.411420745 |
| 8548546 | 2810 | 75.C.-;119.C.A | 0.517924262 | 0.375435555 |
| 8537738 | 2811 | 75.-.G;125.T.G | 0.517546384 | 0.421774082 |
| 14524986 | 2812 | -28.G.T;76.G.- | 0.517443138 | 0.210817034 |
| 8112028 | 2813 | 76.-.A;121.C.A | 0.517164085 | 0.479428413 |
| 8558469 | 2814 | 74.-.T;130.T.G | 0.517109614 | 0.240257462 |
| 8536730 | 2815 | 75.-.G;118.T.G | 0.516654079 | 0.347346716 |
| 1975405 | 2816 | 0.T.C;77.-.A | 0.516223556 | 0.381140846 |
| 8490677 | 2817 | 76.-.6;123.A.C | 0.515655644 | 0.354670318 |
| 14351455 | 2818 | -25.A.C;75.CG.-T | 0.515062617 | 0.304205957 |
| 8519708 | 2819 | 76.GG.-T;123.A.C | 0.514732027 | 0.221694148 |
| 13850181 | 2820 | -14.A.C;86.C.- | 0.514653567 | 0.175135516 |
| 829963 | 2821 | -21.C.A;76.GG.-T | 0.512665825 | 0.195077868 |
| 396157 | 2822 | -27.C.A;1.TA.-- | 0.512397621 | 0.411313736 |
| 8128583 | 2823 | 130.--T.TAG;133.A.G;75.-.C | 0.511360625 | 0.326791328 |
| 3011846 | 2824 | 1.TA.--;133.A.C | 0.510597585 | 0.351631622 |
| 14918900 | 2825 | -29.A.C;2.A.-;75.-.C | 0.510304993 | 0.475271006 |
| 15159253 | 2826 | -29.A.G;74.-.C | 0.509144831 | 0.438279977 |
| 8480820 | 2827 | 78.A.-;131.AG.CC | 0.508771663 | 0.277308284 |
| 2824789 | 2828 | 0.T.-;2.A.C;16.C.- | 0.508408045 | 0.431164458 |
| 8030574 | 2829 | 72.-.C;88.G.- | 0.506884465 | 0.293464717 |

TABLE 24

| | SEQ | | | |
|---|---|---|---|---|
| index | ID NO | muts_lindexed | MI | 95% CI |
| 8103971 | 2830 | 76.GG.-A;115.T.G | 0.506714342 | 0.334208414 |
| 8480769 | 2831 | 130.--T.TAG;133.A.G;78.A.- | 0.506662335 | 0.275750543 |
| 12146846 | 2832 | 2.A.-;118.T.C | 0.506662335 | 0.448261871 |
| 8105632 | 2833 | 76.GG.-A;130.T.G | 0.506661965 | 0.31757799 |
| 14655186 | 2834 | -29.A.C;1.TA.--;78.A.- | 0.505038768 | 0.349546779 |
| 13887801 | 2835 | -14.A.C;2.A.- | 0.50476973 | 0.416608677 |
| 8558448 | 2836 | 74.-.T;130.T.C | 0.504326742 | 0.274992635 |
| 8588552 | 2837 | 73.AT.-G;87.-.G | 0.503452084 | 0.382877256 |
| 4277297 | 2838 | 4.T.-;86.C.T | 0.50273009 | 0.316942926 |
| 8490414 | 2839 | 130.--T.TAG;133.A.G;76.-.G | 0.502294014 | 0.265692536 |
| 8557082 | 2840 | 74.-.T;115.T.G | 0.501788618 | 0.240258884 |
| 3010886 | 2841 | 1.TA.--;119.C.A | 0.501621564 | 0.332438342 |
| 8123134 | 2842 | 75.-.C;82.-.A | 0.500644531 | 0.401625156 |
| 8558564 | 2843 | 74.-.T;131.AG.CC | 0.500523453 | 0.241207919 |
| 10570905 | 2844 | 15.-.T;66.C.- | 0.500493846 | 0.475165652 |
| 8448232 | 2845 | 80.A.-;131.A.C | 0.499354119 | 0.207066339 |
| 1041390 | 2846 | -17.C.A;75.-.A | 0.499154073 | 0.323859893 |
| 646656 | 2847 | -23.C.A;0.T.-;2.A.C | 0.499025819 | 0.25793286 |
| 15167125 | 2848 | -29.A.G;80.A.- | 0.498690448 | 0.246341392 |
| 8105551 | 2849 | 76.GG.-A;128.T.G | 0.497708543 | 0.268069258 |
| 8084057 | 2850 | 74.-.G;129.C.A | 0.495342021 | 0.351272002 |
| 8493858 | 2851 | 76.-.G;91.A.- | 0.495092834 | 0.442273746 |
| 10544166 | 2852 | 15.-.T;91.A.-;93.A.G | 0.494903344 | 0.36111403 |
| 8565224 | 2853 | 75.CG.-T;128.T.G | 0.493977822 | 0.257917935 |
| 8586274 | 2854 | 73.AT.-G;131.A.C | 0.493739387 | 0.325651011 |
| 8362865 | 2855 | 87.-.T;121.C.A | 0.493526779 | 0.439303415 |
| 443254 | 2856 | -27.C.A;88.G.- | 0.492968287 | 0.160647841 |
| 13171639 | 2857 | -1.G.T;75.-.G | 0.492601142 | 0.491746074 |
| 8478628 | 2858 | 78.A.-;116.T.G | 0.491876176 | 0.261017897 |
| 6557301 | 2859 | 18.C.A;76.-.G | 0.49164967 | 0.407268607 |
| 8752532 | 2860 | 55.-.T;75.-.A | 0.491390512 | 0.44462484 |
| 8560929 | 2861 | 74.-.T;91.A.-;93.A.G | 0.491205156 | 0.384453162 |
| 4295718 | 2862 | 4.T.-;78.A.-;132.G.C | 0.491177117 | 0.428226189 |
| 10561864 | 2863 | 15.-.T;76.G.T | 0.491146433 | 0.343126473 |
| 8537677 | 2864 | 75.-.G;125.T.C | 0.489714365 | 0.274407052 |
| 8143025 | 2865 | 76.G.-;129.C.G | 0.489227868 | 0.327699958 |
| 8089936 | 2866 | 75.-.A;89.-.A | 0.488779674 | 0.372660333 |
| 8599794 | 2867 | 70.-.T;76.-.G | 0.488667386 | 0.391145449 |
| 8105873 | 2868 | 76.GG.-A;123.A.C | 0.487861644 | 0.22247771 |
| 8517616 | 2869 | 76.GG.-T;115.T.G | 0.486978242 | 0.198126193 |
| 12149710 | 2870 | 2.A.-;122.A.C | 0.485932471 | 0.444772033 |
| 8489904 | 2871 | 76.-.G;124.T.G | 0.485539102 | 0.229906368 |
| 1164547 | 2872 | -15.T.C;76.G.- | 0.485109654 | 0.30382645 |
| 8653886 | 2873 | 65.GC.-T;87.-.6 | 0.485040713 | 0.238958896 |
| 8074762 | 2874 | 74.-.C;86.C.- | 0.484897947 | 0.341794685 |
| 8480183 | 2875 | 78.A.-;124.T.G | 0.484866253 | 0.155741545 |
| 14921899 | 2876 | -29.A.C;2.A.-;73.A.- | 0.484654008 | 0.412332886 |
| 806417 | 2877 | -21.C.A;0.T.-;2.A.C | 0.484651885 | 0.213811885 |
| 8367608 | 2878 | 86.-.G;132.G.T | 0.484324949 | 0.200140872 |
| 3000591 | 2879 | 1.TA.--;76.G.-;132.G.C | 0.4836883 | 0.410892791 |
| 8602683 | 2880 | 73.A.-;121.C.A | 0.48312272 | 0.181092975 |
| 1250113 | 2881 | -15.T.G;87.-.T | 0.482791984 | 0.353024933 |
| 1246020 | 2882 | -15.T.G;74.-.G | 0.482594805 | 0.468388077 |
| 8095244 | 2883 | 75.-.A;99.-.G | 0.482411376 | 0.440951749 |
| 7516650 | 2884 | 38.C.A;75.-.G | 0.482411376 | 0.23182513 |
| 8101468 | 2885 | 75.C.A;78.A.- | 0.482082335 | 0.243384018 |
| 6420798 | 2886 | 17.T.C;76.G.- | 0.481444121 | 0.122802281 |
| 8080536 | 2887 | 74.-.G;88.G.- | 0.481189232 | 0.304120518 |
| 8583631 | 2888 | 73.AT.-G;86.-.C | 0.481173989 | 0.328294793 |
| 2685339 | 2889 | 0.T.-;2.A.C;121.C.T | 0.480161236 | 0.259384948 |
| 15241190 | 2890 | -29.A.G;2.A.-;76.3G.-T | 0.480084038 | 0.448042386 |
| 4235216 | 2891 | 4.T.-;77.G.A | 0.479539261 | 0.358264062 |
| 333335 | 2892 | 2.A.-;-28.G.C | 0.479358813 | 0.436521088 |
| 15454091 | 2893 | -30.C.G;87.-.G | 0.479044667 | 0.245281612 |
| 8104903 | 2894 | 76.GG.-A;119.C.A | 0.478218223 | 0.290640621 |
| 14795119 | 2895 | -29.A.C72.-.C | 0.478167361 | 0.366311838 |
| 8549156 | 2896 | 126.C.A;75.C.- | 0.477655337 | 0.401183875 |
| 2270186 | 2897 | 0.T.-;119.C.A | 0.476357464 | 0.28961569 |
| 442714 | 2898 | -27.C.A;79.G.- | 0.475921463 | 0.33589485 |
| 2684191 | 2899 | 0.T.-;2.A.C;127.T.C | 0.475552623 | 0.230755681 |
| 2661980 | 2900 | 0.T.-;2.A.C;76.G.-;132.G.T | 0.475543203 | 0.461390486 |
| 8759441 | 2901 | 55.-.T;75.CG.-T | 0.475274664 | 0.3110126 |
| 8548730 | 2902 | 75.C.-;120.C.A | 0.474785619 | 0.390058461 |
| 2517486 | 2903 | 1.T.C;75.CG.-T | 0.474646379 | 0.383115501 |
| 13098412 | 2904 | -1.GT.--;86.-.C | 0.473674402 | 0.202438358 |
| 6556251 | 2905 | 18.C.A;87.-.G | 0.471145708 | 0.219704096 |
| 8539383 | 2906 | 75.-.G;117.G.T | 0.470019299 | 0.350569819 |
| 2728409 | 2907 | 0.T.-;2.A.C;76.GG.-T;132.G.T | 0.469423673 | 0.457772037 |
| 8147743 | 2908 | 76.G.-;89.-.C | 0.468585571 | 0.171258383 |
| 8538151 | 2909 | 75.-.G;132.G.A | 0.467133266 | 0.349055208 |
| 8519808 | 2910 | 76.GG.-T;122.A.C | 0.466576243 | 0.178702651 |
| 8538739 | 2911 | 75.-.G;122.A.G | 0.466576243 | 0.334549602 |
| 8055399 | 2912 | 73.-.A;88.G.- | 0.466033327 | 0.320041272 |
| 8602922 | 2913 | 73.A.-;126.C.A | 0.465865335 | 0.283031316 |
| 8558390 | 2914 | 74.-.T;128.T.G | 0.46527251 | 0.205871798 |
| 8202371 | 2915 | 87.-.A;129.C.A | 0.465267382 | 0.464757478 |
| 8495023 | 2916 | 78.A.-;82.A.G | 0.463214654 | 0.211642756 |
| 8093252 | 2917 | 75.-.A;130.T.C | 0.463013832 | 0.334659591 |
| 2566367 | 2918 | 0.T.-2.A.C;17.T.C | 0.461392589 | 0.268420878 |
| 443194 | 2919 | -27.C.A;87.-.A | 0.460771587 | 0.399261729 |
| 8586216 | 2920 | 73.AT.-G;132.G.C | 0.460668725 | 0.250991995 |
| 8492129 | 2921 | 76.-.G;113.A.G | 0.459948539 | 0.273948034 |
| 8602593 | 2922 | 73.A.-;120.C.A | 0.459546198 | 0.167376352 |
| 12438314 | 2923 | 1.TAC.---;76.-.T | 0.458955662 | 0.409257705 |
| 8018666 | 2924 | 72.-A;111.A.C | 0.458702522 | 0.405962971 |
| 2658141 | 2925 | 0.T.-;2.A.C;76.GG.-C;132.G.C | 0.458544612 | 0.41841279 |
| 2270855 | 2926 | 0.T.-;126.C.A | 0.458127918 | 0.339841458 |
| 3011711 | 2927 | 1.TA.--;129.C.A | 0.457672819 | 0.369464206 |
| 8357785 | 2928 | 87.-.G;130.T.G | 0.457390155 | 0.321441502 |
| 12148855 | 2929 | 2.A.-;128.T.G | 0.456649691 | 0.424208993 |
| 8538425 | 2930 | 75.-.G;126.C.T | 0.456066648 | 0.391670844 |
| 14812176 | 2931 | -29.A.C;78.AG.-T | 0.455217768 | 0.421822764 |
| 959345 | 2932 | -18.T.G;0.T.-;2.A.C | 0.454745656 | 0.262947402 |
| 8352569 | 2933 | 86.C.-;126.C.A | 0.451977309 | 0.231744784 |
| 8562579 | 2934 | 75.CG.-T;86.-.C | 0.451863845 | 0.284864192 |
| 12185280 | 2935 | 2.A.-;80.A.-;132.G.C | 0.451858405 | 0.397487978 |
| 8118567 | 2936 | 76.GG.-C;122.A.C | 0.449218148 | 0.341479227 |
| 8129443 | 2937 | 75.-.C;119.C.T | 0.448058984 | 0.241337157 |
| 8488242 | 2938 | 76.-.G;115.T.G | 0.447807737 | 0.303351067 |
| 2685947 | 2939 | 0.T.-;2.A.C;117.G.T | 0.447350974 | 0.223995386 |
| 2684042 | 2940 | 0.T.-;2.A.C;125.T.G | 0.446446953 | 0.225442366 |
| 2628011 | 2941 | 0.T.-;2.A.C;65.G.A | 0.445909737 | 0.431014642 |
| 1093922 | 2942 | -16.C.A;0.T.- | 0.445744275 | 0.384769858 |
| 14021392 | 2943 | -19.G.T;76.G.- | 0.445446692 | 0.210980489 |
| 14023783 | 2944 | -19.G.T;75.-.G | 0.445006163 | 0.320561961 |
| 8479108 | 2945 | 118.T.C;78.A.- | 0.444437185 | 0.180007604 |
| 4295742 | 2946 | 4.T.-;78.A.-;132.G.T | 0.443700313 | 0.342467455 |
| 8348822 | 2947 | 88.-.T;132.G.C | 0.443636958 | 0.306921941 |
| 8448031 | 2948 | 80.A.-;128.T.G | 0.442657435 | 0.216018231 |
| 8480854 | 2949 | 78.A.-;131.A.G | 0.442172304 | 0.339275348 |
| 8073282 | 2950 | 74.-.C;133.A.C | 0.441868617 | 0.352017188 |
| 2271058 | 2951 | 129.C.A;0.T.- | 0.441858081 | 0.316640496 |
| 12151722 | 2952 | 2.A.-;113.A.C | 0.44078825 | 0.348903885 |
| 13168765 | 2953 | -1.G.T;76.G.- | 0.440234903 | 0.237503321 |
| 8760885 | 2954 | 56.G.T;76.G.- | 0.438783025 | 0.163508619 |
| 8518019 | 2955 | 76.GG.-T;116.T.G | 0.438369692 | 0.235604662 |
| 1117245 | 2956 | -16.C.A;78.A.- | 0.438279124 | 0.16834881 |
| 8592769 | 2957 | 70.-.T;88.G.- | 0.438220877 | 0.244749237 |
| 8628663 | 2958 | 66.CT.-G;79.G.- | 0.438072351 | 0.182645901 |
| 8480752 | 2959 | 78.A.-;132.GA.CC | 0.437930513 | 0.248881928 |
| 8059585 | 2960 | 73.-.A;86.C.- | 0.437225419 | 0.435957495 |
| 13750261 | 2961 | -13.G.T;78.A.- | 0.437054685 | 0.253065367 |
| 8539599 | 2962 | 75.-.G;114.G.T | 0.436888965 | 0.374443118 |
| 8352028 | 2963 | 86.C.-;119.C.A | 0.436035802 | 0.188996533 |
| 8129947 | 2964 | 75.-.C;113.A.C | 0.43594687 | 0.304848987 |
| 8538081 | 2965 | 75.-.G;130.T.C;132.G.C | 0.434698024 | 0.332020273 |
| 8561460 | 2966 | 74.-.T;86.-.G | 0.432879878 | 0.233198854 |
| 8363222 | 2967 | 87.-.T;130.T.G | 0.432369032 | 0.345082874 |
| 15749286 | 2968 | -32.G.T;2.A.- | 0.43081932 | 0.390213068 |
| 8129269 | 2969 | 75.-.C;120.C.T | 0.430595045 | 0.273748314 |
| 445858 | 2970 | -27.C.A;82.AA.-T | 0.430559526 | 0.234423079 |
| 8133915 | 2971 | 75.-.C;80.A.G | 0.430504694 | 0.343719431 |
| 1045161 | 2972 | -17.C.A;82.AA.-T | 0.430467643 | 0.182104489 |
| 2569551 | 2973 | 0.T.-;2.A.C;18.C.A | 0.430355335 | 0.27785676 |
| 8034268 | 2974 | 72.-.C;86.C.- | 0.427635605 | 0.226345972 |
| 481315 | 2975 | -27.C.A;2.A.-;76.G.- | 0.427566605 | 0.366076873 |
| 447361 | 2976 | -27.C.A;75.C.- | 0.427271989 | 0.372051561 |
| 393117 | 2977 | -27.C.A;0.T.-;2.A.C;76.G.- | 0.427167737 | 0.380439384 |
| 672550 | 2978 | -23.C.A;76.GG.-T | 0.426979754 | 0.135361911 |
| 13171223 | 2979 | -1.G.T;78.A.- | 0.426700654 | 0.170495659 |
| 2269114 | 2980 | 0.T.-;115.T.G | 0.424407199 | 0.334312683 |
| 15164751 | 2981 | -29.A.G;89.-.C | 0.424272539 | 0.193097014 |
| 8150288 | 2982 | 77.-.A;133.A.C | 0.423804972 | 0.252292931 |
| 13716962 | 2983 | -13.G.T;0.T.-;2.A.C | 0.42315833 | 0.20734707 |
| 14810153 | 2984 | -29.A.C;80.A.- | 0.422936471 | 0.207060587 |
| 8149925 | 2985 | 77.-.A;121.C.A | 0.42217724 | 0.192407441 |
| 8118444 | 2986 | 76.GG.-C;123.A.C | 0.421898172 | 0.264213012 |
| 15450237 | 2987 | -30.C.G;74.T.- | 0.421545908 | 0.305538885 |
| 13847292 | 2988 | -14.A.C;88.G.- | 0.421223502 | 0.122864931 |
| 8599283 | 2989 | 70.-.T;82.AA.-G | 0.42040004 | 0.308617971 |
| 2258810 | 2990 | 0.T.-;76.G.-;132.G.C | 0.420140578 | 0.380686219 |
| 8352862 | 2991 | 86.C.-;131.AG.CC | 0.42006813 | 0.340106853 |
| 8431466 | 2992 | 82.AA.-T;121.C.A | 0.418074771 | 0.20942073 |
| 10604385 | 2993 | 16.C.T;76.GG.-C | 0.418006899 | 0.309663803 |

TABLE 25

| | SEQ | | | |
|---|---|---|---|---|
| index | ID NO | muts_lindexed | MI | 95% CI |
| 15410869 | 2994 | -30.C.G;1.TA.-- | 0.417875135 | 0.3568233 |
| 14644576 | 2995 | -29.A.C;0.T.-;2.A.C;74 | 0.417019277 | 0.397760744 |
| 8174011 | 2996 | 77.GA.--;133.A.C | 0.416289819 | 0.329786398 |
| 13750370 | 2997 | -13.G.T;76.-.G | 0.415803975 | 0.250075934 |
| 8083409 | 2998 | 74.-.G;119.C.A | 0.415582401 | 0.37566693 |
| 8093325 | 2999 | 130.--T.TAG;133.A.G75.-.A | 0.41506487 | 0.287158065 |
| 7740425 | 3000 | 51.C.A;75.-.G | 0.413952218 | 0.309260684 |
| 2271544 | 3001 | 0.T.-;122.A.C | 0.412907976 | 0.313660504 |
| 8154715 | 3002 | 76.G.-;78.A.C;132.G.T | 0.412514098 | 0.330364487 |
| 2684548 | 3003 | 0.T.-;2.A.C;132.GA.CC | 0.412508844 | 0.221325092 |
| 1042081 | 3004 | -17.C.A;77.-.A | 0.412076905 | 0.146558067 |
| 14808586 | 3005 | -29.A.C;82.AA.-- | 0.411847708 | 0.267953299 |
| 8106752 | 3006 | 76.GG.-A;113.A.C | 0.411607169 | 0.272676178 |
| 8447956 | 3007 | 80.A.-;127.T.G | 0.410631483 | 0.234388742 |
| 8128664 | 3008 | 75.-.C;131.A.G | 0.409653057 | 0.338241648 |
| 1291175 | 3009 | -15.T.G;2.A.-;75.-.G | 0.409209938 | 0.3796168 |
| 1253907 | 3010 | -15.T.G;73.A.- | 0.408538157 | 0.239463307 |
| 8128396 | 3011 | 128.T.C;75.-.C | 0.407284315 | 0.25239378 |
| 14084593 | 3012 | -20.A.C;75.-.G | 0.406446952 | 0.340365597 |
| 2661890 | 3013 | 0.T.-;2.A.C;76.G.-;129.C.A | 0.406369959 | 0.358795066 |
| 8598917 | 3014 | 70.-.T;82.A.- | 0.40571344 | 0.363210997 |
| 8519493 | 3015 | 130.--T.TAG;133.A.G;76.GG.-T | 0.404790669 | 0.16478942 |
| 2655861 | 3016 | 0.T.-;2.A.C;76.GG.-A;132.G.C | 0.404290669 | 0.211492433 |
| 8554353 | 3017 | 74.-C.TA | 0.403856841 | 0.278654898 |
| 6557545 | 3018 | 18.C.A;76.GG.-T | 0.403794566 | 0.248846831 |
| 1247115 | 3019 | -15.T.G;77.-.A | 0.402928751 | 0.162190367 |
| 15450484 | 3020 | -30.C.G;74.-.G | 0.401571837 | 0.368581694 |
| 8105724 | 3021 | 76.GG.-A;131.AG.CC | 0.400845215 | 0.31233423 |
| 14644689 | 3022 | -29.A.C;0.T.-;2.A.C;75.-.A | 0.400778989 | 0.380620086 |
| 8558610 | 3023 | 74.-.T;129.C.G | 0.400473999 | 0.215598514 |
| 8357449 | 3024 | 87.-.G;124.T.G | 0.4003889 | 0.279813501 |
| 15738093 | 3025 | -32.G.T;78.A.- | 0.39957936 | 0.178694312 |
| 8161146 | 3026 | 79.G.-;132.G.T | 0.39905064 | 0.197100501 |
| 827638 | 3027 | -21.C.A;76.GG.-C | 0.399045423 | 0.381135643 |
| 14647317 | 3028 | -29.A.C;0.T.-;2.A.C;74.AT.-G | 0.398936731 | 0.337066703 |
| 8431948 | 3029 | 82.AA.-T;132.G.T | 0.3962767 | 0.282558622 |
| 14344384 | 3030 | -25.A.C;75.-.A | 0.395805888 | 0.31302797 |
| 8508448 | 3031 | 78.A.T;132.G.C | 0.394920905 | 0.354687022 |
| 8150265 | 3032 | 77.-.A;132.G.C | 0.394788052 | 0.232297315 |
| 8654330 | 3033 | 65.GC.-T;78.A.- | 0.394710446 | 0.293953197 |
| 8093514 | 3034 | 75.-.A;123.A.C | 0.393696908 | 0.309225612 |
| 8352775 | 3035 | 86.C.-;130.T.G | 0.39207924 | 0.217323726 |
| 8066628 | 3036 | 74.T.-;130.T.G | 0.391719849 | 0.262493357 |
| 15168618 | 3037 | -29.A.G;76.G.-;78.A.T | 0.389830815 | 0.33561224 |
| 672344 | 3038 | -23.C.A;78.A.- | 0.389587037 | 0.321933192 |
| 8586257 | 3039 | 73.AT.-G;132.G.T | 0.388395464 | 0.296363207 |
| 8105301 | 3040 | 76.GG.-A;124.T.G | 0.388226799 | 0.287549837 |
| 8212901 | 3041 | 86.-.C;131.AG.CC | 0.386148792 | 0.352659282 |
| 13588657 | 3042 | -10.A.C;76.G.- | 0.384737506 | 0.348068257 |
| 728974 | 3043 | -22.T.A;75.-.G | 0.384109233 | 0.325342595 |
| 8448212 | 3044 | 80.A.-;132.G.T | 0.382825545 | 0.197802389 |
| 8128219 | 3045 | 75.-.C;125.T.G | 0.382212437 | 0.342348339 |
| 8084164 | 3046 | 130.--T.TAG;133.A.G;74.-.G | 0.380674413 | 0.324462071 |
| 13800992 | 3047 | -14.A.C;1.TA.-- | 0.380502059 | 0.379567092 |
| 8084111 | 3048 | 74.-.G;130.T.G | 0.379838914 | 0.284915658 |
| 14348272 | 3049 | -25.A.C;87.-.G | 0.375787656 | 0.227005333 |
| 8032112 | 3050 | 72.-.C;121.C.A | 0.374984841 | 0.316858242 |
| 8599500 | 3051 | 70.-.T;80.A.- | 0.374957082 | 0.306856796 |
| 14647476 | 3052 | -29.A.C;0.T.-;2.A.C;73.AT.-G | 0.374849427 | 0.287178991 |
| 8637349 | 3053 | 66.CT.-G;82.A.- | 0.374748495 | 0.369535198 |
| 14059318 | 3054 | 2.A.C;0.T.-;-20.A.C | 0.374318246 | 0.261266848 |
| 5590089 | 3055 | 10.T.C;87.-.T | 0.372525513 | 0.344891 |
| 8105685 | 3056 | 76.GG.-A;130.--T.TAG;133.A.G | 0.372066359 | 0.23292177 |
| 2687214 | 3057 | 0.T.-;2.A.C;113.A.G | 0.370636094 | 0.260077315 |
| 8605752 | 3058 | 73.A.-;82.A.- | 0.369387324 | 0.344859167 |
| 8066727 | 3059 | 74.T.-;131.AG.CC | 0.366894432 | 0.284573613 |
| 872410 | 3060 | -21.C.-;76.G.- | 0.366441507 | 0.282320025 |
| 13168637 | 3061 | -1.G.T;75.-.C | 0.36622796 | 0.325690795 |
| 442575 | 3062 | -27.C.A;77.-.A | 0.365239949 | 0.148841169 |
| 670080 | 3063 | -23.C.A;76.GG.-A | 0.365193115 | 0.229198474 |
| 2536818 | 3064 | 1.T.C;3.C.- | 0.365058878 | 0.278411465 |
| 15239473 | 3065 | -29.A.G;2.A.-;75.-.A | 0.364330715 | 0.307941812 |
| 8599361 | 3066 | 70.-.T;82.AA.-T | 0.364075981 | 0.203190312 |
| 8447558 | 3067 | 80.A.-121.C.A | 0.363793637 | 0.189981353 |
| 8032400 | 3068 | 72.-.C;132.G.C | 0.362895096 | 0.277357076 |
| 2591751 | 3069 | 0.T.-;2.A.C;33.C.A | 0.362710162 | 0.289879239 |
| 8151955 | 3070 | 76.G.-;82.A.G | 0.361619023 | 0.2931134 |
| 829720 | 3071 | -21.C.A;78.A.- | 0.361572174 | 0.340207762 |
| 8633205 | 3072 | 66.CT.-G.133.A.C | 0.361235295 | 0.177612583 |
| 8367621 | 3073 | 86.-.G;131.A.C | 0.360882293 | 0.14994125 |
| 8652746 | 3074 | 65.GC.-T | 0.359676845 | 0.34117811 |
| 8641968 | 3075 | 66.CT.-- | 0.359510719 | 0.335128609 |
| 8489994 | 3076 | 76.-.G;125.T.G | 0.359266847 | 0.243082633 |
| 2271196 | 3077 | 0.T.-;134.G.T | 0.357221231 | 0.333356566 |
| 2684526 | 3078 | 0.T.-;2.A.C;132.G.A | 0.357103171 | 0.210774129 |
| 6557839 | 3079 | 18.C.A;74.-.T | 0.356398057 | 0.194388522 |
| 15057882 | 3080 | -29.A.G;0.T.-;2.A.C;74.T.- | 0.355573213 | 0.347677573 |
| 14812029 | 3081 | -29.A.C;78.A.G | 0.354936599 | 0.331966329 |
| 8565161 | 3082 | 75.CG.-T;127.T.G | 0.354149416 | 0.290483884 |
| 1042365 | 3083 | -17.C.A;77.GA.-- | 0.352230794 | 0.264271374 |
| 1114842 | 3084 | -16.C.A;75.-.C | 0.351420163 | 0.323308043 |
| 3011677 | 3085 | 1.TA.--;128.T.G | 0.349353976 | 0.272131853 |
| 8367521 | 3086 | 86.-.G;129.C.A | 0.349102113 | 0.128912924 |
| 8545111 | 3087 | 75.-.G;82.A.G | 0.348846687 | 0.279265182 |
| 13670603 | 3088 | -12.G.T;0.T.-;2.A.C | 0.346705159 | 0.220809539 |
| 8152309 | 3089 | 76.G.-;80.A.G | 0.344879701 | 0.240148808 |
| 14635704 | 3090 | -29.A.C;0.T.-;78.A.- | 0.343977628 | 0.269327054 |
| 8101708 | 3091 | 75.CGG.-AT | 0.343807137 | 0.263179626 |
| 15738145 | 3092 | -32.G.T;76.-.G | 0.343373872 | 0.282940777 |
| 14351983 | 3093 | -25.A.C;73.A.- | 0.342166961 | 0.317506007 |
| 8066472 | 3094 | 74.T.-;127.T.G | 0.341452423 | 0.218881305 |
| 8134358 | 3095 | 75.-G.CT | 0.340668573 | 0.260397851 |
| 8603055 | 3096 | 73.A.-;129.C.A | 0.339516932 | 0.284512591 |
| 1251152 | 3097 | -15.T.G;82.AA.-T | 0.337292843 | 0.221583879 |
| 1005071 | 3098 | -17.C.A;1.TA.-- | 0.335312695 | 0.306486266 |
| 8137618 | 3099 | 76.G.-;104.C.A | 0.335162523 | 0.190958854 |
| 15158102 | 3100 | -29.A.G;72.-.C | 0.334668341 | 0.245386507 |
| 8129152 | 3101 | 75.-.C;121.C.T | 0.334449323 | 0.186487396 |
| 8208002 | 3102 | 88.G.-;130.T.G | 0.333618091 | 0.136446113 |
| 3581291 | 3103 | 2.-.A;72.-.C | 0.331079889 | 0.299960469 |
| 1251375 | 3104 | -15.T.G;80.A.- | 0.330673201 | 0.237553781 |
| 8128320 | 3105 | 75.-.C;127.T.C | 0.329450929 | 0.31539949 |
| 8356949 | 3106 | 87.-.G;118.T.G | 0.328766524 | 0.276642735 |
| 8552259 | 3107 | 75.C.-;86.C.- | 0.328683252 | 0.274572035 |
| 830221 | 3108 | -21.C.A;74.-.T | 0.328073756 | 0.279164881 |
| 2820364 | 3109 | 0.T.-;2.A.C;18.C.T | 0.328071337 | 0.303059134 |
| 15456319 | 3110 | -30.C.G;76.-.T | 0.327788273 | 0.239917243 |
| 8470089 | 3111 | 78.-.C;126.C.A | 0.327502065 | 0.285083789 |
| 8161135 | 3112 | 79.G.-;133.A.C | 0.327120166 | 0.249238373 |
| 8481813 | 3113 | 78.A.-;119.C.T | 0.326577601 | 0.263148897 |
| 2684845 | 3114 | 0.T.-;2.A.C;126.C.T | 0.326497023 | 0.268527975 |
| 8128793 | 3115 | 75.-.C;126.C.T | 0.325657328 | 0.244960408 |
| 15405296 | 3116 | -30.C.G;0.T.- | 0.324922115 | 0.303112615 |
| 8595845 | 3117 | 70.-.T;129.C.A | 0.323993445 | 0.292377507 |
| 8105737 | 3118 | 76.GG.-A;131.A.C;133.A.C | 0.323238212 | 0.214800697 |
| 8470189 | 3119 | 78.-.C;129.C.A | 0.323151711 | 0.297959942 |
| 14245594 | 3120 | -24.G.T;80.A.- | 0.323015835 | 0.259376759 |
| 1251224 | 3121 | -15.T.G;81.GA.-T | 0.322672044 | 0.236717429 |
| 7939926 | 3122 | 65.G.-;76.G.- | 0.321874555 | 0.229114823 |
| 8648998 | 3123 | 65.G.T;76.G.- | 0.32161445 | 0.165407591 |
| 14098317 | 3124 | -20.A.C;2.A.- | 0.321338341 | 0.261130203 |
| 8032447 | 3125 | 72.-.C;131.A.C | 0.320310642 | 0.25131762 |
| 8061102 | 3126 | 74.T.-;76.G.C | 0.320134619 | 0.17974794 |
| 8481588 | 3127 | 78.A.-;120.C.T | 0.31991061 | 0.266621576 |
| 8565286 | 3128 | 75.CG.-T;130.T.C | 0.319658388 | 0.299836722 |
| 14245896 | 3129 | -24.G.T;76.-.G | 0.318978655 | 0.198135025 |
| 8066445 | 3130 | 74.T.-;127.T.C | 0.318741324 | 0.229575007 |
| 8150200 | 3131 | 77.-.A;129.C.A | 0.318392177 | 0.222652224 |
| 8479230 | 3132 | 78.A.-;118.T.G | 0.315585221 | 0.212655987 |
| 8482576 | 3133 | 78.A.-;113.A.C | 0.313923006 | 0.235801574 |
| 2271423 | 3134 | 0.T.-;123.A.C | 0.313151728 | 0.262740752 |
| 13907909 | 3135 | -14.A.G;0.T.-;2.A.C | 0.312602248 | 0.24235172 |
| 8066743 | 3136 | 74.T.-;131.A.C;133.A.C | 0.311512836 | 0.213517827 |
| 8352697 | 3137 | 86.C.-;128.T.G | 0.31093017 | 0.185786592 |
| 301021 | 3138 | -28.G.C;0.T.-;2.A.C | 0.308009842 | 0.177963593 |
| 8480313 | 3139 | 78.A.-;125.T.G | 0.307352894 | 0.265386782 |
| 8136771 | 3140 | 76.G.-;87.C.A | 0.305748033 | 0.204149437 |
| 8019966 | 3141 | 72.-.A;82.A.- | 0.305426544 | 0.276125022 |
| 8632613 | 3142 | 66.CT.-G;121.C.A | 0.305245351 | 0.18051425 |
| 8583599 | 3143 | 73.AT.-G;88.G.- | 0.305036767 | 0.281668863 |
| 8475891 | 3144 | 78.A.-;88.G.- | 0.304225711 | 0.24315761 |
| 8567785 | 3145 | 75.C.T;77.-.A | 0.303944466 | 0.161149893 |
| 8448066 | 3146 | 80.A.-;129.C.A | 0.303325704 | 0.215444753 |
| 8136691 | 3147 | 76.G.-;86.C.A | 0.302433752 | 0.195854751 |
| 15059855 | 3148 | -29.A.G;0.T.-;2.A.C;66.CT.-G | 0.301250125 | 0.258032296 |
| 13171297 | 3149 | -1.G.T;76.-.G | 0.300469679 | 0.249568302 |
| 8470230 | 3150 | 78.-.C;130.T.G | 0.299543757 | 0.27947901 |
| 8142877 | 3151 | 76.G.-;134.G.C | 0.29949224 | 0.197954128 |
| 555214 | 3152 | -26.T.C;76.G.- | 0.29846809 | 0.182034813 |
| 446048 | 3153 | -27.C.A;80.A.- | 0.298324534 | 0.210212488 |

TABLE 26

| index | SEQ ID NO | muts_1indexed | MI | 95% CI |
|---|---|---|---|---|
| 8436528 | 3154 | 81.GA.-T;121.C.A | 0.297090048 | 0.283427352 |
| 8353141 | 3155 | 86.C.-;122.A.C | 0.296049987 | 0.245918877 |
| 8565426 | 3156 | 75.CG.-T;131.A.G | 0.295840924 | 0.235610502 |
| 8132576 | 3157 | 75.-.C;89.-.C | 0.295816698 | 0.21575762 |
| 8092121 | 3158 | 75.-.A;116.T.G | 0.295438612 | 0.276704748 |
| 8633166 | 3159 | 66.CT.-G;132.G.C | 0.295238555 | 0.137541162 |
| 8142165 | 3160 | 76.G.-;124.T.C | 0.294668253 | 0.252511967 |
| 2686290 | 3161 | 0.T.-;2.A.C;114.G.T | 0.294611939 | 0.235882425 |
| 8161038 | 3162 | 79.G.-;129.C.A | 0.293458957 | 0.265995213 |
| 13853578 | 3163 | -14.A.C;76.-.T | 0.292814241 | 0.239208093 |
| 807836 | 3164 | -21.C.A;1.TA.-- | 0.291985874 | 0.265062731 |
| 8469754 | 3165 | 78.-.C;119.C.A | 0.290688734 | 0.158231713 |
| 8137474 | 3166 | 76.G.-;101.C.A | 0.290545033 | 0.225586567 |
| 8160587 | 3167 | 79.G.-;120.C.A | 0.290485378 | 0.16140082 |
| 8142955 | 3168 | 76.G.-;131.AGA.CCC | 0.289861064 | 0.156100467 |
| 8762708 | 3169 | 56.G.T;75.-.G | 0.288589286 | 0.245071065 |
| 14635887 | 3170 | 0.T.-;-29.A.C;75.-.G | 0.287655949 | 0.220550516 |
| 15455571 | 3171 | -30.C.G;78.-.C | 0.286554251 | 0.151262545 |
| 8066265 | 3172 | 74.T.-;124.T.G | 0.284557684 | 0.18450021 |
| 8436842 | 3173 | 81.GA.-T;130.T.G | 0.283443437 | 0.227668014 |
| 13846354 | 3174 | -14.A.C;79.G.- | 0.282193081 | 0.194513828 |
| 8490993 | 3175 | 76.-.G;121.C.T | 0.281487779 | 0.237968585 |
| 14646258 | 3176 | -29.A.C;0.T.-;2.A.C;87.-.T | 0.281390861 | 0.280842128 |
| 8431378 | 3177 | 82.AA.-T;120.C.A | 0.279359971 | 0.217352128 |
| 8431703 | 3178 | 82.AA.-T;126.C.A | 0.278958399 | 0.248775754 |
| 447910 | 3179 | -27.C.A;73.AT.-G | 0.27887466 | 0.214623934 |
| 8066683 | 3180 | 74.T.-;130.--T.TAG;133.A.G | 0.278590377 | 0.236479801 |
| 2760011 | 3181 | 0.T.-;2.A.C;58.G.T | 0.27816451 | 0.250084418 |
| 3012063 | 3182 | 1.TA.--;123.A.C | 0.277695499 | 0.270902767 |
| 13855018 | 3183 | -14.A.C;73.A.- | 0.277345113 | 0.240410092 |
| 8447252 | 3184 | 80.A.-;119.C.A | 0.276750412 | 0.261342977 |
| 8489127 | 3185 | 76.-.G;118.T.G | 0.275614164 | 0.268649953 |
| 8526408 | 3186 | 76.-.T;126.C.A | 0.275422119 | 0.186856595 |
| 8446211 | 3187 | 80.A.-;115.T.G | 0.273001999 | 0.176712389 |
| 8431937 | 3188 | 82.AA.-T;133.A.C | 0.272461593 | 0.215640473 |
| 6558231 | 3189 | 18.C.A;73.A.- | 0.270722227 | 0.209417884 |
| 8159873 | 3190 | 79.G.-;115.T.G | 0.270544898 | 0.219973209 |
| 8602463 | 3191 | 73.A.-;119.C.A | 0.267631124 | 0.229610693 |
| 2684642 | 3192 | 0.T.-;2.A.C;131.AGA.CCC | 0.267606676 | 0.193922958 |
| 8143095 | 3193 | 76.G.-;126.C.G | 0.26607975 | 0.205850153 |
| 1042210 | 3194 | -17.C.A;79.G.- | 0.263898352 | 0.153341127 |
| 15452123 | 3195 | -30.C.G;88.G- | 0.262802964 | 0.246339122 |
| 13852053 | 3196 | -14.A.C;80.A.- | 0.262449421 | 0.238482785 |
| 8435985 | 3197 | 81.GA.-T;115.T.G | 0.261537752 | 0.210117266 |
| 223220 | 3198 | -30.C.A;76.G.- | 0.260927881 | 0.212705604 |
| 12148242 | 3199 | 2.A.-;124.T.C | 0.259970416 | 0.231655778 |
| 8602984 | 3200 | 73.A.-;127.T.G | 0.259333216 | 0.17429791 |
| 318643 | 3201 | -28.G.C;75.-.C | 0.258711926 | 0.253858239 |
| 15451555 | 3202 | -30.C.G;79.G.- | 0.258610617 | 0.228040833 |
| 8436802 | 3203 | 81.GA.-T;129.C.A | 0.258102815 | 0.221392597 |
| 8512529 | 3204 | 76.G.-;78.A.T;131.A.C | 0.256573774 | 0.192299447 |
| 8519060 | 3205 | 76.GG.-T;124.T.G | 0.254764495 | 0.17776839 |
| 1045581 | 3206 | -17.C.A;78.-.C | 0.254111585 | 0.16098974 |
| 13844608 | 3207 | -14.A.C;74.T.- | 0.251536336 | 0.230596398 |
| 13171509 | 3208 | -1.G.T;76.GG.-T | 0.251215355 | 0.178972378 |
| 8336250 | 3209 | 89.-.C;121.C.A | 0.247903737 | 0.177200161 |
| 15455277 | 3210 | -30.C.G;80.A.- | 0.24643105 | 0.215568133 |
| 8353027 | 3211 | 86.C.-;123.A.C | 0.245734783 | 0.146234159 |
| 8161013 | 3212 | 79.G.-;128.T.G | 0.245117825 | 0.184156133 |
| 8105760 | 3213 | 76.GG.-A;129.C.G | 0.243519956 | 0.200992141 |
| 8558713 | 3214 | 74.-.T;123.A.C | 0.243362245 | 0.217508129 |
| 2681904 | 3215 | 0.T.-;2.A.C;116.T.C | 0.243150168 | 0.227835889 |
| 8558310 | 3216 | 74.-.T;127.T.C | 0.238872167 | 0.164543464 |
| 2684449 | 3217 | 0.T-;2.A.C;130.T.C;132.G.C | 0.234640315 | 0.191407277 |
| 15052207 | 3218 | -29.A.G;0.T.-;75.-.G | 0.232527238 | 0.228978007 |
| 8524468 | 3219 | 76.G.T;78.A.- | 0.231822737 | 0.184427214 |
| 7490514 | 3220 | 36.C.A;76.GG.-A | 0.230612085 | 0.201072386 |
| 8633217 | 3221 | 66.CT.-G;132.G.T | 0.225041391 | 0.188349309 |
| 8069615 | 3222 | 74.T.-;89.-.C | 0.224219112 | 0.182205253 |
| 15451403 | 3223 | -30.C.G;77.-.A | 0.22377016 | 0.141786542 |
| 8520167 | 3224 | 76.GG.-T;119.C.T | 0.222213862 | 0.181552856 |
| 10994911 | 3225 | 8.G.T;76.G.- | 0.221857972 | 0.186488557 |
| 2272784 | 3226 | 0.T.-;113.A.G | 0.217602613 | 0.188068889 |
| 8100983 | 3227 | 75.C.A;87.-.G | 0.20946824 | 0.207400395 |
| 13851721 | 3228 | -14.A.C;82.AA.-T | 0.208699774 | 0.190610953 |
| 8084086 | 3229 | 74.-.G;130.T.C | 0.207083817 | 0.200301272 |
| 8564034 | 3230 | 75.CG.-T;116.T.G | 0.206201826 | 0.195294871 |
| 1117838 | 3231 | -16.C.A;75.CG.-T | 0.205361121 | 0.20010844 |
| 14023671 | 3232 | -19.G.T;76.GG.-T | 0.205124123 | 0.18913669 |
| 8519544 | 3233 | 76.GG.-T;131.A.C;133.A.C | 0.201318374 | 0.159186928 |
| 8633185 | 3234 | 66.CT.-G | 0.199632516 | 0.137407357 |
| 14817545 | 3235 | -29.A.C;66.CT.-G | 0.199449017 | 0.147317397 |
| 1482006 | 3236 | -9.T.C;76.G.- | 0.199005805 | 0.183058025 |
| 14524849 | 3237 | -28.G.T;75.-.C | 0.198371675 | 0.181096792 |
| 8470132 | 3238 | 78.-.C;127.T.G | 0.197187102 | 0.191993677 |
| 7738954 | 3239 | 51.C.A;76.G.- | 0.188853628 | 0.174711687 |
| 1247296 | 3240 | -15.T.G;79.G.- | 0.188770966 | 0.162582829 |
| 8519864 | 3241 | 76.GG.-T;122.A.G | 0.187827314 | 0.124500437 |
| 1117512 | 3242 | -16.C.A;76.GG.-T | 0.185440387 | 0.166113954 |
| 15171788 | 3243 | -29.A.G;66.CT.-G | 0.184297092 | 0.119128778 |
| 8601732 | 3244 | 73.A.-;115.T.G | 0.182910648 | 0.17442519 |
| 6556220 | 3245 | 18.C.A;86.C.- | 0.182226427 | 0.124165253 |
| 8633071 | 3246 | 66.CT.-G;129.C.A | 0.174547902 | 0.164343167 |
| 8499488 | 3247 | 78.A.-;80.A.G | 0.170717115 | 0.165935562 |
| 8519321 | 3248 | 76.GG.-T;128.T.C | 0.169470546 | 0.133277047 |
| 14348190 | 3249 | -25.A.C;86.C.- | 0.164802634 | 0.107431366 |
| 321013 | 3250 | -28.G.C;74.-.T | 0.163668333 | 0.162660862 |

[0341] Approximately 140 modified gRNAs were generated, some by DME and some by targeted engineering, and assayed for their ability to disrupt expression of a target GFP reporter construct by creation of indels. Sequences for these gRNA variants are shown in Table 3. These modified gRNAs exclude modifications to the spacer region, and instead comprise different modified scaffolds (the portion of the sgRNA that interacts with the CRISPR protein, protein binding segment). gRNA scaffolds generated by DME include one or more deletions, substitutions, and insertions, which can consist of a single or several bases. The remaining gRNA variants were rationally engineered based on knowledge of thermostable RNA structures, and are either terminal fusions of ribozymes or insertions of highly stable stem loop sequences. Additional gRNAs were generated by combining gRNA variants. The results for select gRNA variants are shown in Table 27 below.

TABLE 27
Ability of select gRNA variants to disrupt GFP expression.

| | | Normalized | |
|---|---|---|---|
| | | Editing | |
| SEQ ID | | Activity (ave, | |
| NO: | NAME (Description) | 2 spacers n = 6) | Std. dev. |
| 5 | X2 reference | — | — |
| 2101 | phage replication stable | 1.42 | 0.22 |
| 2102 | Kissing loop_b1 | 1.17 | 0.11 |
| 2103 | Kissing loop_a | 1.18 | 0.03 |
| 2104 | 32, uysX hairpin | 1.89 | 0.11 |
| 2105 | PP7 | 1.08 | 0.04 |
| 2106 | 64, trip mut, extended stem truncation | 1.69 | 0.18 |
| 2107 | hyperstable tetraloop | 1.36 | 0.11 |
| 2108 | C18G | 1.22 | 0.42 |
| 2109 | T17G | 1.27 | 0.04 |
| 2110 | CUUCGG loop | 1.24 | 0.22 |
| 2111 | MS2 | 1.12 | 0.25 |
| 2112 | −1, A2G, −78, G77T | 1.00 | 0.18 |
| 2113 | QB | 1.44 | 0.25 |
| 2114 | 45, 44 hairpin | 0.24 | 0.41 |
| 2115 | U1A | 1.02 | 0.05 |
| 2116 | A14C, T17G | 0.86 | 0.01 |
| 2117 | CUUCGG loop modified | 0.75 | 0.04 |
| 2118 | Kissing loop_b2 | 0.99 | 0.06 |
| 2119 | −76:78, −83:87 | 0.97 | 0.01 |
| 2120 | −4 | 0.93 | 0.03 |
| 2121 | extended stem truncation | 0.73 | 0.02 |
| 2124 | −98:100 | 0.66 | 0.05 |
| 2125 | −1:5 | 0.45 | 0.05 |
| 2126 | −2163 | 0.57 | 0.02 |
| 2127 | =+G28, A82T, −84, | 0.56 | 0.04 |
| 2128 | =+51T | 0.52 | 0.03 |
| 2129 | −1:4, +G5A, +G86, | 0.09 | 0.21 |
| 2130 | 2174 | 0.34 | 0.09 |
| 2131 | +g72 | 0.34 | 0.24 |
| 2132 | shorten front, CUUCGG loop | 0.65 | 0.02 |
| | modified. extend extended | | |
| 2133 | A14C | 0.37 | 0.03 |
| 2134 | −1:3, +G3 | 0.45 | 0.16 |
| 2135 | =+C45, +T46 | 0.42 | 0.04 |
| 2136 | CUUCGG loop modified, fun start | 0.38 | 0.03 |
| 2137 | −74:75 | 0.18 | 0.04 |
| 2138 | \hat{ }T45 | 0.21 | 0.05 |
| 2139 | −69, −94 | 0.24 | 0.09 |
| 2140 | −94 | 0.01 | 0.01 |
| 2141 | modified CUUCGG, minus T in 1st triplex | 0.04 | 0.03 |
| 2142 | −1:4, +C4, A14C, T17G, +G72, −76:78, −83:87 | 0.16 | 0.03 |
| 2143 | T1C, −73 | 0.06 | 0.06 |
| 2144 | Scaffold uuCG, stem uuCG. Stem swap, t shorten | 0.01 | 0.09 |
| 2145 | Scaffold uuCG, stem uuCG. Stem swap | 0.04 | 0.03 |
| 2146 | 0.0090408 | 0.06 | 0.04 |
| 2147 | no stem Scaffold uuCG | −0.11 | 0.02 |
| 2148 | no stem Scaffold uuCG, fun start | −0.06 | 0.02 |
| 2149 | Scaffold uuCG, stem uuCG, fun start | −0.02 | 0.02 |
| 2150 | Pseudoknots | −0.01 | 0.01 |
| 2151 | Scaffold uuCG, stem uuCG | −0.05 | 0.01 |
| 2152 | Scaffold uuCG, stem uuCG, no start | −0.04 | 0.02 |
| 2153 | Scaffold uuCG | −0.12 | 0.07 |
| 2154 | +GCTC36 | −0.20 | 0.05 |
| 2155 | G quadriplex telomere basket + ends | −0.21 | 0.02 |
| 2156 | G quadriplex M3q | −0.25 | 0.04 |
| 2157 | G quadriplex telomere basket no ends | −0.17 | 0.04 |
| 2159 | Sarcin-ricin loop | 0.40 | 0.03 |
| 2160 | uvsX, C18G | 1.94 | 0.06 |
| 2161 | truncated stem loop, C18G, trip mut (T10C) | 1.97 | 0.16 |
| 2162 | short phage rep, C18G | 1.91 | 0.17 |
| 2163 | phage rep loop, C18G | 1.72 | 0.13 |
| 2164 | +G18, stacked onto 64 | 1.44 | 0.08 |
| 2165 | truncated stem loop, C18G, −1 A2G | 1.63 | 0.40 |
| 2166 | phage rep loop, C18G, trip mut (T10C) | 1.76 | 0.12 |
| 2167 | short phage rep, C18G, trip mut (T10C) | 1.20 | 0.09 |
| 2168 | uvsX, trip mut (T10C) | 1.54 | 0.12 |
| 2169 | truncated stem loop | 1.50 | 0.10 |
| 2170 | +A17, stacked onto 64 | 1.54 | 0.13 |
| 2171 | 3′ HDV genomic ribozyme | 1.13 | 0.13 |
| 2172 | phage rep loop, trip mut (T10C) | 1.39 | 0.10 |
| 2173 | −79:80 | 1.33 | 0.05 |
| 2174 | short phage rep, trip mut (T10C) | 1.19 | 0.10 |
| 2175 | extra truncated stem loop | 1.08 | 0.05 |
| 2176 | T17G, C18G | 0.94 | 0.09 |
| 2177 | short phage rep | 1.11 | 0.05 |
| 2178 | uvsX, C18G, −1 A2G | 0.62 | 0.08 |
| 2179 | uvsX, C18G, trip mut (T10C), −1 A2G, | 1.06 | 0.08 |
| | HDV −99 G65U | | |
| 2180 | 3′ HDV antigenomic ribozyme | 1.20 | 0.07 |
| 2181 | uvsX, C18G, trip mut (T10C), −1 A2G, | 0.95 | 0.03 |
| | HDV AA(98:99)C | | |
| 2182 | 3′ HDV ribozyme (Lior Nissim, Timothy Lu) | 1.08 | 0.01 |
| 2183 | TAC(1:3)GA, stacked onto 64 | 0.92 | 0.04 |
| 2184 | uvsX, −1 A2G | 1.46 | 0.13 |
| 2185 | truncated stem loop, C18G, trip mut (T10C), | 0.80 | 0.02 |
| | −1 A2G, HDV −99 G65U | | |
| 2186 | short phage rep, C18G, trip mut (T10C), | 0.80 | 0.05 |
| | −1 A2G, HDV −99 G65U | | |
| 2187 | 3′ sTRSV WT viral Hammerhead ribozyme | 0.98 | 0.03 |
| 2188 | short phage rep, C18G, −1 A2G | 1.78 | 0.18 |
| 2189 | short phage rep, C18G, trip mut (T10C), | 0.81 | 0.08 |
| | −1 A2G, 3′ genomic HDV | | |
| 2190 | phage rep loop, C18G, trip mut (T10C), | 0.86 | 0.07 |
| | −1 A2G, HDV −99 G65U | | |
| 2191 | 3′ HDV ribozyme (Owen Ryan, Jamie Cate) | 0.78 | 0.04 |
| 2192 | phage rep loop, C18G, −1 A2G | 0.70 | 0.08 |
| 2193 | \hat{ }C55 | 0.78 | 0.03 |
| 2194 | −78, G77T | 0.73 | 0.07 |
| 2195 | \hat{ }G1 | 0.73 | 0.10 |
| 2196 | short phage rep, −1 A2G | 0.66 | 0.11 |
| 2197 | truncated stem loop, C18G, trip mut (T10C), | 0.68 | 0.09 |
| | −1 A2G | | |
| 2198 | −1, A2G | 0.54 | 0.07 |
| 2199 | truncated stem loop, trip mut (T10C), −1 A2G | 0.40 | 0.03 |
| 2200 | uvsX, C18G, trip mut (T10C), −1 A2G | 0.35 | 0.11 |
| 2201 | phage rep loop, −1 A2G | 0.96 | 0.05 |
| 2202 | phage rep loop, trip mut (T10C), −1 A2G | 0.49 | 0.06 |
| 2203 | phage rep loop, C18G, trip mut (T10C), −1 A2G | 0.73 | 0.13 |
| 2204 | truncated stem loop, C18G | 0.59 | 0.02 |
| 2205 | uvsX, trip mut (T10C), −1 A2G | 0.56 | 0.08 |
| 2206 | truncated stem loop, −1 A2G | 0.89 | 0.07 |
| 2207 | short phage rep, trip mut (T10C), −1 A2G | 0.37 | 0.12 |
| 2208 | 5′HDV ribozyme (Owen Ryan, Jamie Cate) | 0.39 | 0.03 |
| 2209 | 5′HDV genomic ribozyme | 0.35 | 0.06 |
| 2210 | truncated stem loop, C18G, trip mut (T10C), | 0.24 | 0.04 |
| | −1 A2G, HDV AA(98:99)C | | |
| 2211 | 5′env25 pistol ribozyme (with an added | 0.33 | 0.07 |
| | CUUCGG loop) | | |
| 2212 | 5′HDV antigenomic ribozyme | 0.17 | 0.01 |
| 2213 | 3′ Hammerhead ribozyme (Lior Nissim, | 0.09 | 0.02 |
| | Timothy Lu) guide scaffold scar | | |
| 2214 | +A27, stacked onto 64 | 0.03 | 0.03 |
| 2215 | 5′Hammerhead ribozyme (Lior Nissim, | 0.18 | 0.03 |
| | Timothy Lu) smaller scar | | |
| 2216 | phage rep loop, C18G, trip mut (T10), | 0.13 | 0.04 |
| | −1 A2G, HDV AA(98:99)C | | |
| 2217 | −27, stacked onto 64 | 0.00 | 0.03 |
| 2218 | 3′ Hatchet | 0.09 | 0.01 |
| 2219 | 3′ Hammerhead ribozyme (Lior Nissim, | 0.05 | 0.03 |
| | Timothy Lu) | | |
| 2220 | 5′Hatchet | 0.04 | 0.03 |
| 2221 | 5′HDV ribozyme (Lior Nissim, Timothy Lu) | 0.08 | 0.01 |
| 2222 | 5′Hammerhead ribozyme (Lior Nissim, | 0.22 | 0.01 |
| | Timothy Lu) | | |
| 2223 | 3′ HH15 Minimal Hammerhead ribozyme | 0.01 | 0.01 |
| 2224 | 5′ RBMX recruiting motif | −0.08 | 0.03 |
| 2225 | 3′ Hammerhead ribozyme (Lior Nissim, | −0.04 | 0.02 |
| | Timothy Lu) smaller scar | | |
| 2226 | 3′ env25 pistol ribozyme (with an added | −0.01 | 0.01 |
| | CUUCGG loop) | | |
| 2227 | 3′ Env-9 Twister | −0.17 | 0.02 |
| 2228 | +ATTATCTCATTACT25 | −0.18 | 0.27 |
| 2229 | 5′Env-9 Twister | −0.02 | 0.01 |
| 2230 | 3′ Twisted Sister 1 | −0.27 | 0.02 |
| 2231 | no stem | −0.15 | 0.03 |
| 2232 | 5′HH15 Minimal Hammerhead ribozyme | −0.18 | 0.04 |
| 2233 | 5′Hammerhead ribozyme (Lior Nissim, | −0.14 | 0.01 |
| | Timothy Lu) guide scaffold scar | | |
| 2234 | 5′Twisted Sister 1 | −0.14 | 0.04 |
| 2235 | 5′sTRSV WT viral Hammerhead ribozyme | −0.15 | 0.02 |
| 2236 | 148, =+G55, stacked onto 64 | 3.40 | 0.18 |
| 2239 | 175, trip mut, extended stem truncation, | 1.18 | 0.09 |
| | with [T] deletion at 5′ end | | |

[0342] Although guide stability can be measured thermodynamically (for example, by analyzing melting temperatures) or kinetically (for example, using optical tweezers to measure folding strength), without wishing to be bound by any theory it is believed that a more stable sgRNA bolsters CRISPR editing efficiency. Thus, editing efficiency was used as the primary assay for improved guide function.

[0343] The activity of the gRNA scaffold variants was assayed using E6 and E7 spacers targeting GFP. The starting sgRNA scaffold in this case was a reference Planctomyces CasX tracr RNA fused to a Planctomyces Crispr RNA (crRNA) using a “GAAA” stem loop (SEQ ID NO: 5). The activity of variant gRNAs shown in Table 27 was normalized to the activity of this starting, or base, sgRNA scaffold.

[0344] The sgRNA scaffold was cloned into a small (less than 3 kilobase pair) plasmid with a 3′ type II restriction enzyme site for dropping in different spacers. The spacer region of the sgRNA is the part of the sgRNA interacts with the target DNA, and does not interact directly with the CasX protein. Thus, scaffold changes should be spacer independent. One way to achieve this is by executing sgRNA DME and testing sgRNA variants using several distinct spacers, such as the E6 and E7 spacers targeting GFP. This reduces the possibility of creating an sgRNA scaffold variant that works well with one spacer sequence targeting one genetic target, but not other spacer sequences directed to other targets. For the data shown in Table 27, the E6 and E7 spacer sequences targeting GFP were used. Repression of GFP expression by sgRNA variants was normalized to GFP repression by the sgRNA starting scaffold of SEQ ID NO: 5 assayed with the same spacer sequence(s).

[0345] Activity of select sgRNA variants is shown in FIGS. 5A and 5B, mean change in activity is shown in Table 27, and sgRNA variant sequences are provided in Table 3. sgRNA variants with increased activity were tested in HEK293 cells as described in Example 1.

### Example 4: Mutagenesis of CasX Protein Produces Improved Variants

[0346] A selectable, mammalian-expression plasmid was constructed that included a reference, also referred to herein as starting or base, CasX protein sequence, an sgRNA scaffold, and a destination sequence that can be replaced by spacer sequences. In this case, the starting CasX protein was SEQ ID NO: 2, the wild type Planctomycetes CasX sequence and the scaffold was the wild type sgRNA scaffold of SEQ ID NO: 5. This destination plasmid was digested using the appropriate restriction enzyme following manufacturer's protocol. Following digestion, the digested DNA was purified using column purification according to manufacturer's protocol. The E6 and E7 spacer oligos targeting GFP were annealed in 10 uL of annealing buffer. The annealed oligos were ligated to the purified digested backbone using a Golden Gate ligation reaction. The Golden Gate ligation product was transformed into chemically competent bacterial cells and plated onto LB agar plates with the appropriate antibiotic. Individual colonies were picked, and the GFP spacer insertion was verified via Sanger sequencing.

[0347] The following methods were used to construct a DME library of CasX variant proteins. The functional Plm CasX system, which is a 978 residue multi-domain protein (SEQ ID NO: 2) can function in a complex with a 108 bp sgRNA scaffold (SEQ ID NO: 5), with an additional 3′ 20 bp variable spacer sequence, which confers DNA binding specificity. Construction of the comprehensive mutation library thus required two methods: one for the protein, and one for the sgRNA. Plasmid recombineering was used to construct a DME protein library of CasX variant proteins. PCR-based mutagenesis was used to construct an RNA library of the sgRNA. Importantly, the DME approach can make use of a variety of molecular biology techniques. The techniques used for genetic library construction can be variable, while the design and scope of mutations encompasses the DME method.

[0348] In designing DME mutations for the reference CasX protein, synthetic oligonucleotides were constructed as follows: for each codon, three types of oligonucleotides were synthesized. First, the substitution oligonucleotide replaced the three nucleotides of the codon with one of 19 possible alternative codons which code for the 19 possible amino acid mutations. 30 base pair flanking regions of perfect homology to the target gene allow programmable targeting of these mutations. Second, a similar set of 20 synthetic oligonucleotides encoded the insertion of single amino acids. Here, rather than replace the codon, a new region consisting of three base pairs was inserted between the codon and the flanking homology region. Twenty different sets of three nucleotides were inserted, corresponding to new codons for each of the twenty amino acids. Larger insertions can be built identically but will contain an additional three, six, or nine base pairs, encoding all possible combinations of two, three, or four amino acids. Third, an oligonucleotide was designed to remove the three base pairs comprising the codon, thus deleting the amino acid. As above, oligonucleotides can be designed to delete one, two, three, or four amino acids. Plasmid recombineering was then used to recombine these synthetic mutations into a target gene of interest, however other molecular biology methods can be used in its place to accomplish the same goal.

[0349] Table 28 shows fold enrichment of CasX variant protein DME libraries created from the reference protein of SEQ ID NO: 2, which were then subjected to DME selection/screening processes.

[0350] In Table 28 below, the read counts associated with each of the listed variants was determined. Each variant was defined by its position (0-indexed), reference base, and alternate base. Only sequences with at least 10 reads (summed) across samples were analyzed, to filter from 457K variants to 60K variants. An insertion at position i indicates an inserted base between position i-1 and i (i.e., before the indicated position). ‘counts’ indicates the sequencing-depth normalized read count per sequence per sample. Technical replicates were combined by taking the geometric mean. ‘log2enrichment’ gives the median enrichment (using a pseudocount of 10) across each context, or across all samples, after merging for technical replicates. Each context was normalized by its own naive sample. Finally, the ‘log2enrichment_err’ gives the ‘confidence interval’ on the mean log2 enrichment. It is the std. deviation of the enrichment across samples *2/sqrt of the number of samples. Below, only the sequences with median log2enrichment−log2enrichment_err>0 are shown (60274 sequences examined).

[0351] The computational protocol used to generate Table 28 was as follows: each sample library was sequenced on an Illumina HiSeq for 150 cycles paired end (300 cycles total). Reads were trimmed to remove adapter sequences, and aligned to a reference sequence. Reads were filtered if they did not align to the reference, or if the expected number of errors per read was high, given the phred base quality scores. Reads that aligned to the reference sequence, but did not match exactly, were assessed for the protein mutation that gave rise to the mismatch, by aligning the encoded protein sequence of the read to the protein sequence of the reference at the aligned location. Any consecutive variants were grouped into one variant that extended multiple residues. The number of reads that support any given variant was determined for each sample. This raw variant read count per sample was normalized by the total number of reads per sample (after filtering for low expected number of errors per read, given the phred quality scores) to account for different sequencing depths. Technical replicates were combined by finding the geometric mean of variant normalized read count (shown below, ‘counts’). Enrichment was calculated for each sample by diving by the naive read count (with the same context—i.e. D2, D3, DDD). To down weight the enrichment associated with low read count, a pseudocount of 10 was added to the numerator and denominator during the enrichment calculation. The enrichment for each context is the median across the individual gates, and the enrichment overall is the median enrichment across the gates and contexts. Enrichment error is the standard deviation of the log2 enrichment values, divided by the sqrt of the number of values per variant, multiplied by 2 to make a 95% confidence interval on the mean.

[0352] Heat maps of DME variant enrichment for each position of the CasX reference protein are shown in FIGS. 7A-7I and FIGS. 8A-8C. Fold enrichment of DME variants with single substitutions, insertions and deletions of each amino acid of the reference CasX protein of SEQ ID NO: 2 are shown. FIGS. 7A-7I and Table 28 summarize the results when the DME experiment was run at 37° C. FIGS. 8A-8C summarize the results when the same experiment was run at 45° C. A comparison of the data in FIGS. 7A-7I and FIGS. 8A-8C shows that running the same assay at two temperatures enriches for different variants. A comparison of the two temperatures thus indicates which amino acid residues and changes are important for thermostability and folding, and can be targeted to produce CasX variant proteins with improved thermostability and folding. FIG. 9 shows a survey of the comprehensive mutational landscape of all single mutations of the reference CasX protein of SEQ ID NO: 2.

TABLE 28
Fold enrichment of CasX DME variants.

| Pos. | Ref. | Alt. | Med. Enrich. | 95% CI | Pos. | Ref. | Alt. | Med. Enrich. | 95% CI |
|---|---|---|---|---|---|---|---|---|---|
| 11 | R | N | 3.123689614 | 1.666090155 | 877 | V | D | 1.738762289 | 0.688664606 |
| 13 | -- | AS | 2.772897791 | 0.812692873 | 459 | K | W | 1.696823829 | 0.67904004 |
| 13 | -- | AG | 2.740825108 | 1.138556052 | 891 | E | K | 1.6928634 | 0.819015932 |
| 12 | - | V | 2.739405927 | 1.743064315 | 9 | - | T | 1.667698181 | 0.626564384 |
| 13 | -- | TS | 2.69239793 | 1.005397595 | 19 | - | R | 1.664532235 | 0.885325268 |
| 12 | - | Y | 2.676525308 | 1.621386271 | 11 | R | P | 1.655382042 | 1.234907956 |
| 754 | FE | LA | 2.638126094 | 0.709679147 | 793 | - | L | 1.585086754 | 0.91714318 |
| 13 | - | L | 2.63160466 | 1.131924801 | 931 | S | L | 1.583295371 | 0.643295534 |
| 14 | V | S | 2.616515776 | 1.515637887 | 12 | -- | AG | 1.580094246 | 1.037517499 |
| 877 | V | G | 2.558943878 | 1.132565008 | 770 | M | P | 1.577648056 | 1.061356917 |
| 21 | - | D | 2.295527175 | 0.893253582 | 791 | L | E | 1.551380949 | 0.823309399 |
| 12 | -- | PG | 2.222956581 | 1.243693989 | 21 | - | A | 1.542633652 | 0.760237264 |
| 824 | V | M | 2.181465681 | 1.137291381 | 814 | F | H | 1.510927821 | 0.672796928 |
| 12 | - | Q | 2.102167857 | 1.396704669 | 12 | - | C | 1.506305374 | 0.730799624 |
| 13 | L | E | 2.049540302 | 0.886997965 | 791 | L | S | 1.505731571 | 0.598349327 |
| 12 | R | A | 2.046419725 | 1.229773759 | 792 | -- | AS | 1.474378912 | 0.833339427 |
| 889 | S | K | 2.030682939 | 0.721857305 | 12 | - | L | 1.46896091 | 0.783746198 |
| 791 | - | Q | 1.996189679 | 0.799796529 | 795 | T | - | 1.465811841 | 0.744738295 |
| 21 | - | S | 1.907167641 | 0.736834562 | 792 | - | Q | 1.462809015 | 0.586506727 |
| 14 | - | A | 1.89090961 | 1.25865759 | 11 | R | S | 1.459875087 | 0.740946571 |
| 11 | R | M | 1.88125645 | 0.779897343 | 11 | R | T | 1.450818176 | 0.908088492 |
| 856 | Y | R | 1.83253552 | 0.74976479 | 738 | A | V | 1.397545277 | 0.638310372 |
| 707 | A | Q | 1.830052571 | 0.555234229 | 791 | - | Y | 1.382702158 | 0.877495368 |
| 16 | - | D | 1.826796594 | 1.168291076 | 384 | E | P | 1.36783963 | 0.775382596 |
| 17 | S | G | 1.799890039 | 0.536675637 | 793 | -- | ST | 1.351743597 | 0.608183464 |
| 931 | S | M | 1.798321904 | 1.171026479 | 738 | A | T | 1.349932545 | 0.581386051 |
| 13 | L | V | 1.782912682 | 0.513630591 | 781 | W | Q | 1.342276465 | 0.719454459 |
| 11 | -- | AS | 1.782444935 | 0.75642805 | 17 | - | G | 1.340746587 | 0.878053267 |
| 856 | Y | K | 1.748619552 | 0.651026121 | 12 | -- | AS | 1.333635165 | 1.19716917 |
| 796 | -- | AS | 1.742437726 | 0.859039085 | 771 | A | Y | 1.292995852 | 0.871463205 |
| 792 | - | E | 1.290525566 | 1.195462062 | 979 | L-E[stop] | VSSK (SEQ | 1.125229136 | 0.372301096 |
| | | | | | | | ID NO: 3797) | | |
| 921 | A | M | 1.28763891 | 0.560591034 | 936 | R | Q | 1.117866436 | 0.745233062 |
| 979 | LE[stop]GS- | VSSKDL | 1.282505495 | 0.371661154 | 979 | LE[stop]GS- | VSSKDLQAS | 1.111969193 | 0.311410682 |
| | | (SEQ ID NO: | | | | PGIK (SEQ ID | N (SEQ ID | | |
| | | 3804) | | | | NO: 3279) | NO: 3813) | | |
| 770 | M | Q | 1.279910431 | 1.186538897 | 396 | Y | Q | 1.105278825 | 0.646150998 |
| 16 | -- | AG | 1.271874994 | 0.55951096 | 979 | LE[stop]GSP | VSSKDL | 1.104849849 | 0.260693612 |
| | | | | | | | (SEQ ID NO: | | |
| | | | | | | | 3804) | | |
| 384 | E | N | 1.247124467 | 0.607911368 | 353 | L | F | 1.103922948 | 0.510520582 |
| 979 | L- | VS | 1.239823793 | 0.315337927 | 979 | LE[stop]GS- | VSSKDLQA | 1.100880851 | 0.345695892 |
| | | | | | | PG (SEQ ID | (SEQ ID NO: | | |
| | | | | | | NO: 3251) | 3810) | | |
| 979 | LE[stop] | VSS | 1.233215135 | 0.36262523 | 697 | Y | H | 1.097977697 | 0.419010874 |
| 658 | --D | APG | 1.220851584 | 0.979760686 | 796 | -- | PG | 1.095168865 | 0.816765224 |
| 979 | L-E | VSS | 1.21568584 | 0.37106558 | 4 | -- | TS | 1.088089915 | 0.693109756 |
| 385 | E | S | 1.210243487 | 0.826999735 | 10 | R | K | 1.085472062 | 0.382234839 |
| 979 | LE[stop]GS- | VSSKDLQAS | 1.208612972 | 0.286427519 | 790 | G | M | 1.066566819 | 0.686227232 |
| | PGIK (SEQ ID | NK (SEQ ID | | | | | | | |
| | NO: | NO: 3814) | | | | | | | |
| | 3279)[stop] | | | | | | | | |
| 793 | -- | SA | 1.192367811 | 0.72089465 | 921 | A | K | 1.056315246 | 0.70226115 |
| 739 | R | A | 1.188987234 | 0.611670208 | 696 | - | R | 1.049001055 | 0.880941583 |
| 795 | -- | AS | 1.183930928 | 0.90542554 | 9 | I | L | 1.039309233 | 0.528320595 |
| 979 | LE[stop]GS-P | VSSKDLQ | 1.180100725 | 0.35995062 | 979 | LE[stop]GSPG | VSSKDLQAS | 1.037884742 | 0.299531766 |
| | | (SEQ ID NO: | | | | IK (SEQ ID | NK (SEQ ID | | |
| | | 3809) | | | | NO: | NO: 3814) | | |
| | | | | | | 3279)[stop]N | | | |
| 977 | V | K | 1.17977084 | 0.720108501 | 13 | - | S | 1.031062599 | 0.727357338 |
| 658 | --D | AAS | 1.173300666 | 0.50353561 | 384 | E | R | 1.028117481 | 0.683537724 |
| 14 | -- | TS | 1.173232132 | 0.700156049 | 21 | K | D | 1.019445543 | 0.748518701 |
| 10 | - | V | 1.164019233 | 1.085055677 | 978 | [stop] | G | 1.016498062 | 0.514955543 |
| 375 | E | K | 1.163948709 | 0.891802018 | 979 | L-E[stop]G | VSSKD (SEQ | 1.016126075 | 0.353515679 |
| | | | | | | | ID NO: 3800) | | |
| 795 | -- | AG | 1.14629929 | 0.481029275 | 10 | R | N | 1.010184099 | 0.846798556 |
| 979 | LE[stop]GSPG | VSSKDLQ | 1.143633475 | 0.340695621 | 794 | -- | PG | 1.00924007 | 0.987312969 |
| | (SEQ ID NO: | (SEQ ID NO: | | | | | | | |
| | 3251) | 3809) | | | | | | | |
| 979 | LE | VS | 1.142516835 | 0.386398408 | 741 | L | W | 0.851844349 | 0.594072278 |
| 877 | V | Q | 1.141917178 | 0.655790093 | 24 | - | W | 0.835220929 | 0.745009807 |
| 791 | L | Q | 1.004388299 | 0.361910793 | 755 | E | [stop] | 0.833955657 | 0.31600491 |
| 792 | P | G | 1.002325281 | 0.805296973 | 928 | I | T | 0.832425124 | 0.307759846 |
| 877 | V | C | 0.995089773 | 0.566724231 | 979 | LE[stop]GS- | VSSKDLQAS | 0.822335062 | 0.317179456 |
| | | | | | | PGI (SEQ ID | (SEQ ID NO: | | |
| | | | | | | NO: 3278) | 3812) | | |
| 476 | C | Y | 0.984546648 | 0.686487573 | 781 | W | K | 0.810589018 | 0.686153856 |
| 19 | -- | PG | 0.984071689 | 0.738694244 | 791 | L | R | 0.806201856 | 0.611654466 |
| 979 | LE[stop]GSPG | VSSKDLQA | 0.972011014 | 0.292930615 | 979 | LE[stop]GSPG | VSSKDLQAS | 0.80600706 | 0.220866187 |
| | I (SEQ ID NO: | (SEQ ID NO: | | | | IK (SEQ ID | N (SEQ ID | | |
| | 3278) | 3810) | | | | NO: | NO: 3813) | | |
| | | | | | | 3279)[stop] | | | |
| 752 | L | P | 0.971338521 | 0.459371253 | 711 | E | Q | 0.793874739 | 0.38732268 |
| 12 | R | C | 0.969988229 | 0.745286116 | 703 | T | N | 0.791134752 | 0.735228799 |
| 12 | R | Y | 0.962112567 | 0.714384629 | 793 | S | - | 0.7821232 | 0.523699668 |
| 979 | LE[stop]GSPG | VSSKDLQAS | 0.960035296 | 0.298173201 | 385 | E | K | 0.781091846 | 0.579724424 |
| | IK (SEQ ID | (SEQ ID NO: | | | | | | | |
| | NO: 3279) | 3812) | | | | | | | |
| 18 | -- | PG | 0.952532997 | 0.782330584 | 955 | R | M | 0.780963169 | 0.340474646 |
| 778 | M | I | 0.945963409 | 0.345538178 | 469 | - | N | 0.775656135 | 0.541879732 |
| 798 | S | P | 0.942103893 | 0.470224487 | 788 | Y | T | 0.770125047 | 0.581859138 |
| 16 | D | G | 0.941159649 | 0.341870864 | 705 | Q | R | 0.76633283 | 0.261069709 |
| 22 | A | Q | 0.937573643 | 0.676316271 | 9 | -- | TS | 0.763723778 | 0.674640849 |
| 754 | FE | IA | 0.935796963 | 0.660936674 | 979 | LE[stop]GS | VSSKD (SEQ | 0.761764547 | 0.205465156 |
| | | | | | | | ID NO: 3800) | | |
| 1 | Q | K | 0.935474248 | 0.373656765 | 715 | A | K | 0.761122086 | 0.540516283 |
| 14 | V | F | 0.932689058 | 0.742246472 | 384 | E | K | 0.760859162 | 0.22641046 |
| 8 | K | I | 0.928472117 | 0.521050669 | 591 | QG | R- | 0.757963418 | 0.374903235 |
| 384 | E | G | 0.920571639 | 0.452302777 | 316 | R | M | 0.757086682 | 0.310302995 |
| 732 | D | T | 0.912254061 | 0.759438627 | 770 | M | T | 0.753193128 | 0.319236781 |
| 658 | D | Y | 0.894131769 | 0.312165116 | 384 | E | Q | 0.752976137 | 0.602376709 |
| 211 | L | P | 0.887315174 | 0.318877781 | 17 | S | E | 0.752400908 | 0.414988963 |
| 14 | V | A | 0.885138345 | 0.699864156 | 755 | E | D | 0.74863141 | 0.212934852 |
| 979 | LE[stop]G | V--S | 0.884897395 | 0.252782429 | 12 | R | - | 0.743504623 | 0.648509511 |
| 13 | - | F | 0.883212774 | 0.713984249 | 938 | Q | E | 0.741570425 | 0.469451701 |
| 979 | LE[stop]G | VSSK (SEQ | 0.881127427 | 0.417135617 | 657 | I | V | 0.73806027 | 0.256874713 |
| | ID NO: 3797) | | | | | | | | |
| 386 | D | K | 0.879045429 | 0.728272074 | 656 | G | C | 0.659813316 | 0.293973226 |
| 5 | R | I | 0.871114116 | 0.317513506 | 4 | K | N | 0.656251908 | 0.302190904 |
| 660 | -- | AS | 0.862493953 | 0.798632847 | 774 | Q | E | 0.654737733 | 0.134116674 |
| 877 | V | M | 0.855677916 | 0.267740831 | -1 | S | C | 0.652333059 | 0.118222939 |
| -1 | S | T | 0.735179004 | 0.144429929 | 21 | -- | AS | 0.651563705 | 0.48650799 |
| 2 | E | [stop] | 0.734071396 | 0.323713248 | 185 | L | P | 0.649897837 | 0.225081568 |
| 384 | E | A | 0.733775595 | 0.660142332 | 38 | P | T | 0.648698083 | 0.350485275 |
| 891 | E | Y | 0.733458673 | 0.465192765 | 936 | R | H | 0.648045448 | 0.423309347 |
| 643 | V | F | 0.732765961 | 0.577614171 | 813 | G | C | 0.644003475 | 0.310838653 |
| 796 | - | C | 0.732364738 | 0.485790322 | 786 | L | M | 0.643153738 | 0.314936636 |
| 280 | L | M | 0.731787266 | 0.258239226 | 942 | K | N | 0.639528926 | 0.249553292 |
| 695 | - | K | 0.730902961 | 0.509205112 | 293 | Y | H | 0.636816244 | 0.207205991 |
| 343 | W | L | 0.725824372 | 0.292120452 | 542 | F | L | 0.635949082 | 0.181128276 |
| 3 | ------ | IKRINK (SEQ | 0.721338414 | 0.470264314 | 303 | W | L | 0.635588216 | 0.261903568 |
| | | ID NO: 3475) | | | | | | | |
| 732 | D | N | 0.71945188 | 0.416870981 | 979 | LE | V[stop] | 0.635165807 | 0.329009453 |
| 687 | --- | PTH | 0.716433371 | 0.159856315 | 578 | P | H | 0.634392073 | 0.324298942 |
| 176 | A | D | 0.71514177 | 0.206626688 | 687 | -- | PT | 0.633217575 | 0.355316701 |
| 485 | W | L | 0.713411462 | 0.238105577 | 886 | K | N | 0.632562679 | 0.231080349 |
| 22 | A | D | 0.710738042 | 0.32510753 | 20 | K | R | 0.632186797 | 0.237509121 |
| 193 | L | P | 0.709349304 | 0.242633498 | 248 | L | P | 0.631068881 | 0.180279623 |
| 899 | R | M | 0.707875506 | 0.298429738 | 18 | N | S | 0.630660766 | 0.266585824 |
| 886 | KG | R- | 0.706803824 | 0.286241441 | 836 | M | V | 0.630065132 | 0.266534124 |
| 796 | -- | TS | 0.697218521 | 0.492426198 | 116 | K | N | 0.629540403 | 0.234219411 |
| 329 | P | H | 0.696817542 | 0.314817482 | 847 | EG | GA | 0.628295048 | 0.299740787 |
| 273 | L | P | 0.696199602 | 0.349703999 | 912 | L | P | 0.627137425 | 0.187179246 |
| 31 | L | M | 0.696080627 | 0.331245769 | 92 | P | H | 0.626243107 | 0.350245614 |
| 645 | - | E | 0.692307595 | 0.590013131 | 299 | Q | K | 0.623386276 | 0.302029469 |
| 9 | I | Y | 0.689813642 | 0.667593375 | 707 | A | T | 0.622086487 | 0.275515174 |
| 9 | 1 | N | 0.688953393 | 0.257809633 | 669 | L | M | 0.620453868 | 0.351072046 |
| 919 | H | R | 0.688781806 | 0.363439859 | 789 | E | D | 0.617920878 | 0.216264385 |
| 687 | P | H | 0.684782236 | 0.310607479 | 916 | F | S | 0.617302977 | 0.309372822 |
| 332 | P | H | 0.672484781 | 0.326219913 | 55 | P | li | 0.616365993 | 0.329695842 |
| 796 | - | N | 0.672333697 | 0.64437503 | 936 | R | G | 0.615282844 | 0.189389227 |
| 421 | W | L | 0.667702097 | 0.291970479 | 595 | F | L | 0.615176885 | 0.154670433 |
| 875 | E | [stop] | 0.66617872 | 0.287006304 | 0 | M | 1 | 0.612039515 | 0.303853593 |
| 378 | L | K | 0.664474618 | 0.393361359 | 925 | A | P | 0.581907283 | 0.186614282 |
| 891 | E | Q | 0.663650921 | 0.312291932 | 659 | R | L | 0.580864225 | 0.319384189 |
| 926 | L | M | 0.661737644 | 0.525550321 | 306 | L | P | 0.578183307 | 0.210431982 |
| 381 | L | R | 0.609889042 | 0.420808291 | 676 | P | Q | 0.577757554 | 0.308473522 |
| 945 | T | A | 0.609683347 | 0.258353939 | 877 | V | E | 0.57724394 | 0.294796776 |
| 389 | K | N | 0.609647876 | 0.274048697 | 19 | T | A | 0.576889973 | 0.198407278 |
| 755 | E | G | 0.607714844 | 0.078377344 | 14 | V | D | 0.574902804 | 0.437270334 |
| 559 | I | M | 0.606040482 | 0.27336203 | 887 | G | Q | 0.574717855 | 0.519529758 |
| 825 | L | P | 0.604240507 | 0.192490062 | 935 | L | V | 0.573813105 | 0.185021716 |
| 733 | M | T | 0.603960776 | 0.340233556 | 961 | W | L | 0.573698555 | 0.253700288 |
| 664 | P | T | 0.60370266 | 0.234348448 | 23 | -- | GP | 0.572198674 | 0.570313308 |
| 10 | R | T | 0.602483957 | 0.372156893 | 541 | R | L | 0.571508027 | 0.254421711 |
| 964 | F | L | 0.60175279 | 0.17004436 | 288 | E | D | 0.571482463 | 0.24542675 |
| 911 | C | S | 0.601303891 | 0.279730674 | 742 | L | V | 0.570384839 | 0.3027928 |
| 788 | Y | G | 0.600935917 | 0.580949772 | 931 | S | T | 0.570369019 | 0.120673525 |
| 447 | Q | K | 0.600543047 | 0.297568309 | 623 | ------- | RRTRQDE | 0.569913903 | 0.141118873 |
| | | | | | | | (SEQ ID NO: | | |
| | | | | | | | 3684) | | |
| 13 | L | P | 0.599989903 | 0.236688663 | 27 | P | H | 0.569605452 | 0.285015385 |
| 193 | L | M | 0.599332216 | 0.309308194 | 28 | M | T | 0.56885021 | 0.216863369 |
| 114 | P | H | 0.599262194 | 0.344450733 | 907 | E | [stop] | 0.567613159 | 0.345163987 |
| 660 | G | R | 0.599221963 | 0.319640645 | 577 | D | Y | 0.567493308 | 0.253952459 |
| 894 | S | T | 0.599084973 | 0.166490359 | 672 | P | H | 0.566921749 | 0.31335168 |
| 904 | P | H | 0.59783828 | 0.349499416 | 669 | L | P | 0.564276636 | 0.224594167 |
| 782 | L | T | 0.595786463 | 0.513346845 | 52 | E | D | 0.564250133 | 0.246311739 |
| 944 | Q | K | 0.595243666 | 0.351818545 | 46 | N | T | 0.563094073 | 0.208662987 |
| 207 | P | H | 0.595218482 | 0.277632613 | 5 | R | G | 0.560139309 | 0.15069426 |
| 151 | H | N | 0.595188624 | 0.277503327 | 912 | L | V | 0.559515875 | 0.111973397 |
| 495 | A | K | 0.594637604 | 0.315764586 | 40 | L | M | 0.558605774 | 0.239058063 |
| -1 | S | P | 0.594582952 | 0.377333364 | 923 | Q | [stop] | 0.558515774 | 0.34688202 |
| 480 | L | E | 0.594055289 | 0.432259346 | 979 | L- E[stop]G | VSSKE (SEQ | 0.557263947 | 0.22994802 |
| | | | | | | | ID NO: 3826) | | |
| 469 | E | A | 0.594025118 | 0.30338267 | 41 | R | T | 0.555902565 | 0.199937528 |
| 11 | R | G | 0.59320688 | 0.163279008 | 179 | E | [stop] | 0.555817911 | 0.245362937 |
| 85 | W | L | 0.591691074 | 0.2708118 | 344 | W | L | 0.555474112 | 0.286390208 |
| 15 | K | E | 0.587925122 | 0.149546484 | 703 | T | R | 0.53396819 | 0.160757401 |
| 755 | E | K | 0.586636571 | 0.217538569 | 962 | Q | E | 0.533896042 | 0.302336405 |
| 337 | Q | R | 0.585098232 | 0.172195554 | 764 | Q | H | 0.53385913 | 0.24340782 |
| 877 | V | A | 0.584567684 | 0.258968272 | 793 | S | T | 0.533306619 | 0.17379091 |
| 793 | -- | TS | 0.583269098 | 0.45091329 | 6 | I | M | 0.533192185 | 0.188523563 |
| 670 | I | R | 0.582033902 | 0.112618756 | 467 | L | P | 0.533022246 | 0.179464215 |
| 63 | R | M | 0.554978749 | 0.336590825 | 244 | Q | [stop] | 0.532045714 | 0.262393061 |
| 1 | Q | R | 0.554755158 | 0.207724233 | 8 | K | N | 0.531704561 | 0.294399975 |
| 9 | I | V | 0.554053334 | 0.219348804 | 508 | F | V | 0.529042378 | 0.192146822 |
| 914 | C | [stop] | 0.552658801 | 0.347714953 | 665 | A | P | 0.529013767 | 0.174049723 |
| 836 | M | I | 0.551813626 | 0.180327214 | 46 | NL | T[stop] | 0.529006897 | 0.272198259 |
| 856 | Y | H | 0.549262192 | 0.369311354 | 3 | I | V | 0.528916598 | 0.14506718 |
| 620 | L | M | 0.548957556 | 0.322210662 | 518 | W | S | 0.528332889 | 0.199792834 |
| 926 | L | P | 0.547714601 | 0.450095044 | 792 | P | A | 0.528028079 | 0.112407207 |
| 377 | L | P | 0.546553821 | 0.20366425 | 13 | L | A | 0.526728857 | 0.318983292 |
| 920 | A | S | 0.545992524 | 0.484867291 | 56 | Q | K | 0.526387006 | 0.188452852 |
| 961 | W | [stop] | 0.544371204 | 0.244581668 | 878 | N | S | 0.526073971 | 0.27887921 |
| 746 | V | G | 0.543151726 | 0.512718498 | 213 | Q | E | 0.525578421 | 0.16885346 |
| 554 | --- | RFY | 0.542549772 | 0.20487223 | 748 | Q | H | 0.525406412 | 0.200108279 |
| 664 | P | H | 0.542466431 | 0.281534858 | 15 | K | N | 0.525094369 | 0.273038164 |
| 5 | R | [stop] | 0.541304946 | 0.166704906 | 954 | K | N | 0.524763966 | 0.208680978 |
| 803 | Q | K | 0.540975244 | 0.291121648 | 835 | W | L | 0.524725836 | 0.26540236 |
| 652 | M | I | 0.540953074 | 0.217563311 | 847 | E | D | 0.524019387 | 0.23897504 |
| 326 | KG | R- | 0.540593574 | 0.402287668 | 608 | L | M | 0.523890883 | 0.248052068 |
| 789 | E | [stop] | 0.540122225 | 0.236046287 | 932 | W | R | 0.523129128 | 0.299781077 |
| 889 | S | L | 0.539927241 | 0.375365013 | 21 | K | N | 0.522953217 | 0.250998038 |
| 10 | R | I | 0.539433301 | 0.326816988 | 790 | G | [stop] | 0.5229473 | 0.262740975 |
| 725 | K | N | 0.539088606 | 0.178127049 | 707 | A | D | 0.522560362 | 0.214610237 |
| 603 | L | P | 0.538897648 | 0.229282796 | 954 | K | V | 0.522546614 | 0.349200627 |
| 15 | K | R | 0.538786311 | 0.154390287 | 952 | T | A | 0.521534511 | 0.149679645 |
| 541 | R | G | 0.537572295 | 0.133876643 | 892 | A | D | 0.521298872 | 0.228218092 |
| 632 | L | M | 0.537440995 | 0.246129141 | 847 | ------- | EGQITYY | 0.521149636 | 0.115331328 |
| | | | | | | | (SEQ ID NO: | | |
| | | | | | | | 3388) | | |
| 665 | A | S | 0.536996011 | 0.286216687 | 7 | N | I | 0.521103862 | 0.202836314 |
| 650 | K | E | 0.536939626 | 0.139863469 | 917 | E | K | 0.509268127 | 0.386629094 |
| 932 | W | L | 0.536075206 | 0.314946873 | 12 | R | I | 0.509210198 | 0.267908359 |
| 684 | L | M | 0.535519584 | 0.338883641 | 326 | K | N | 0.508325806 | 0.277854988 |
| 918 | T | R | 0.535067274 | 0.304580877 | 802 | A | W | 0.507146644 | 0.398619961 |
| 10 | R | G | 0.534873359 | 0.3557865 | 627 | Q | H | 0.506946344 | 0.17779761 |
| 575 | F | L | 0.534865272 | 0.139851134 | 705 | Q | K | 0.506601342 | 0.205329495 |
| 737 | T | G | 0.534759369 | 0.303617666 | 935 | L | P | 0.505173269 | 0.279127846 |
| 907 | E | G | 0.534688762 | 0.240107856 | 636 | L | P | 0.504912592 | 0.279575261 |
| 702 | R | M | 0.520743818 | 0.247227864 | 378 | L | V | 0.504856105 | 0.146721248 |
| 901 | S | G | 0.520379757 | 0.143482219 | 770 | M | I | 0.502407214 | 0.148647414 |
| 560 | N | H | 0.519240936 | 0.286066696 | 302 | I | T | 0.502263164 | 0.328365742 |
| 350 | V | M | 0.518159753 | 0.277778553 | 584 | P | H | 0.501836401 | 0.188263444 |
| 535 | F | L | 0.518099748 | 0.153008763 | 962 | Q | H | 0.501557133 | 0.21210836 |
| 512 | Y | H | 0.517168474 | 0.223506594 | 909 | F | L | 0.501216251 | 0.397907118 |
| 278 | 1 | M | 0.516794992 | 0.238648894 | 522 | G | C | 0.50035512 | 0.232143601 |
| 746 | V | A | 0.51672383 | 0.202625874 | 233 | M | I | 0.500272986 | 0.246898577 |
| 664 | P | R | 0.516702968 | 0.252959416 | 284 | P | R | 0.499965267 | 0.18413971 |
| -1 | S | A | 0.516689693 | 0.142459137 | 639 | E | D | 0.499845638 | 0.16815712 |
| 298 | A | D | 0.51645727 | 0.257163483 | 351 | K | E | 0.49917291 | 0.274793088 |
| 361 | G | C | 0.515521808 | 0.242033529 | 12 | R | S | 0.498984129 | 0.193129295 |
| 424 | 1 | V | 0.515355817 | 0.185117148 | 920 | A | V | 0.498509984 | 0.394258252 |
| 907 | E | D | 0.514835248 | 0.277377403 | 709 | E | [stop] | 0.498173203 | 0.222297538 |
| 923 | Q | E | 0.514826301 | 0.324456465 | 443 | S | H | 0.498010803 | 0.445232627 |
| 413 | W | L | 0.514728329 | 0.241932097 | 27 | P | L | 0.497724007 | 0.373177387 |
| 748 | Q | R | 0.514571576 | 0.240563892 | 849 | Q | K | 0.497661989 | 0.259123161 |
| 591 | Q | H | 0.514415886 | 0.331792035 | 793 | - | Q | 0.497102388 | 0.47673495 |
| 1 | Q | E | 0.514404075 | 0.263908964 | 750 | A | G | 0.496799617 | 0.243940432 |
| 171 | P | T | 0.513803013 | 0.237477165 | 26 | G | C | 0.496365725 | 0.228107532 |
| 544 | K | R | 0.512919851 | 0.163480182 | 706 | A | D | 0.494947511 | 0.225683587 |
| 677 | ------- | LSRFKD | 0.511837147 | 0.194279796 | 431 | L | P | 0.494543065 | 0.192514906 |
| | | (SEQ ID NO: | | | | | | | |
| | | 3577) | | | | | | | |
| 377 | L | M | 0.511718619 | 0.274965484 | 13 | LV | AS | 0.494489513 | 0.367074627 |
| 1 | Q | H | 0.511496323 | 0.29357307 | 0 | M | V | 0.49405414 | 0.206071479 |
| 202 | R | M | 0.511365875 | 0.303187834 | 614 | R | I | 0.494053835 | 0.209299062 |
| 422 | E | [stop] | 0.511043687 | 0.224103239 | 248 | L | M | 0.49299868 | 0.24880607 |
| 922 | E | [stop] | 0.510570886 | 0.450135707 | 81 | L | M | 0.492127571 | 0.369172442 |
| 407 | ------- | KKHGED | 0.510425363 | 0.211479415 | | | | | |
| | | (SEQ ID NO: | | | | | | | |
| | | 3500) | | | | | | | |
| 8 | K | A | 0.510125467 | 0.417426274 | 921 | D | Y | 0.479522102 | 0.330930172 |
| 300 | I | M | 0.510084254 | 0.178542003 | 17 | S | R | 0.479410291 | 0.242870401 |
| 668 | A | P | 0.509985424 | 0.202934866 | 23 | G | C | 0.47738757 | 0.286426817 |
| 418 | - | D | 0.49144742 | 0.21486801 | 892 | A | G | 0.477302415 | 0.253000116 |
| 914 | C | R | 0.490784001 | 0.353820866 | 832 | A | T | 0.47606534 | 0.23451824 |
| 3 | I | S | 0.490305334 | 0.219289736 | 421 | W | [stop] | 0.475666945 | 0.216973062 |
| 781 | W | L | 0.490256264 | 0.225567162 | 316 | R | S | 0.47464939 | 0.264534919 |
| 234 | G | [stop] | 0.489800943 | 0.231905474 | 681 | K | N | 0.474468269 | 0.192816933 |
| 369 | A | V | 0.489746571 | 0.142680124 | 22 | A | V | 0.474221933 | 0.206217506 |
| 685 | G | C | 0.48966455 | 0.174412352 | 691 | L | M | 0.473867575 | 0.189071763 |
| 498 | A | S | 0.489397172 | 0.173872708 | 95 | L | V | 0.473859579 | 0.188485586 |
| 746 | V | D | 0.488692506 | 0.484120982 | 827 | K | N | 0.47365473 | 0.198868181 |
| 666 | -- | AG | 0.488446913 | 0.383322789 | 858 | R | M | 0.473407136 | 0.257236194 |
| 309 | W | L | 0.487964134 | 0.209151088 | 519 | Q | P | 0.472315609 | 0.224391717 |
| 979 | ---- | VSSK (SEQ | 0.486810051 | 0.287650542 | 95 | L | P | 0.471361064 | 0.162277972 |
| | | ID NO: 3797) | | | | | | | |
| 27 | P | R | 0.486771244 | 0.185539954 | 976 | A | T | 0.470889659 | 0.109031 |
| 583 | L | M | 0.486474099 | 0.232216764 | 782 | L | I | 0.470558203 | 0.125178365 |
| 760 | G | R | 0.485722591 | 0.195838563 | 723 | A | S | 0.469929973 | 0.218713854 |
| 596 | I | T | 0.485474246 | 0.130718203 | 24 | K | R | 0.469399175 | 0.236250784 |
| 189 | G | [stop] | 0.484957086 | 0.271997616 | 748 | Q | E | 0.46890075 | 0.291020418 |
| 884 | W | L | 0.48469466 | 0.210361106 | 686 | --- | NPT | 0.468711675 | 0.157459195 |
| 162 | E | [stop] | 0.484515492 | 0.270313618 | 1 | Q | L | 0.468380179 | 0.341181409 |
| 405 | L | P | 0.484058533 | 0.143471721 | 466 | G | V | 0.467982153 | 0.207162352 |
| 815 | T | A | 0.483688268 | 0.140346764 | 346 | --- | MVC | 0.467747954 | 0.140593808 |
| 875 | E | D | 0.483680843 | 0.230122106 | 746 | V | L | 0.467699466 | 0.162488099 |
| 703 | T | K | 0.483561705 | 0.243688021 | 101 | Q | K | 0.467562845 | 0.263058522 |
| 35 | V | A | 0.48268809 | 0.163074127 | 99 | V | L | 0.467355555 | 0.098627209 |
| 320 | K | E | 0.482629615 | 0.202594011 | 354 | I | M | 0.46704321 | 0.243813968 |
| 203 | E | D | 0.482289135 | 0.173584261 | 826 | E | [stop] | 0.466802563 | 0.164892155 |
| 202 | R | S | 0.482184999 | 0.1640178 | 150 | P | L | 0.466773068 | 0.200507693 |
| 613 | G | C | 0.482001189 | 0.220237462 | 476 | C | R | 0.466682009 | 0.123054893 |
| 220 | A | P | 0.481251117 | 0.159715468 | 38 | P | H | 0.466309116 | 0.291701454 |
| 920 | A | G | 0.481026982 | 0.321704418 | 120 | E | [stop] | 0.465867266 | 0.21730484 |
| 874 | E | Q | 0.480905869 | 0.250463545 | 370 | G | R | 0.465477814 | 0.252126933 |
| 192 | A | G | 0.480770514 | 0.112319124 | 7 | N | K | 0.465102103 | 0.221573061 |
| 578 | P | T | 0.48002354 | 0.203348553 | 920 | A | P | 0.45449471 | 0.288443793 |
| 515 | A | P | 0.480000762 | 0.142980394 | 701 | Q | H | 0.453812486 | 0.146230302 |
| 55 | P | T | 0.465075846 | 0.236340763 | 891 | E | [stop] | 0.453785945 | 0.233457013 |
| 681 | K | E | 0.464515385 | 0.142005053 | 133 | C | W | 0.453639333 | 0.137405208 |
| 781 | W | C | 0.464433122 | 0.295451154 | 370 | G | V | 0.453597184 | 0.202403506 |
| 946 | N | D | 0.463522655 | 0.373105851 | 548 | E | D | 0.453077345 | 0.109679349 |
| 368 | L | M | 0.463023353 | 0.266615533 | 689 | H | D | 0.453055551 | 0.09160837 |
| 0 | M | T | 0.462868938 | 0.232012879 | 931 | S | R | 0.45302365 | 0.382294772 |
| 737 | T | A | 0.462760296 | 0.301960654 | 133 | C | [stop] | 0.452586533 | 0.10138833 |
| 847 | ---- | EGQI (SEQ | 0.462759431 | 0.219565444 | 868 | E | [stop] | 0.452282618 | 0.301898798 |
| | | ID NO: 3385) | | | | | | | |
| 0 | M | K | 0.462242932 | 0.245616902 | 33 | V | L | 0.451975838 | 0.159872004 |
| 711 | E | [stop] | 0.461879161 | 0.191719959 | 266 | D | Y | 0.451699485 | 0.165335876 |
| 357 | K | N | 0.461332764 | 0.184353442 | 497 | E | D | 0.451539434 | 0.154482619 |
| 434 | H | D | 0.461154018 | 0.191223379 | 661 | E | [stop] | 0.45138977 | 0.234896635 |
| 910 | V | E | 0.460870605 | 0.281013173 | 897 | K | N | 0.451376493 | 0.172130787 |
| 922 | E | D | 0.460080408 | 0.286351122 | 894 | S | G | 0.451201568 | 0.216541569 |
| 480 | L | D | 0.459795711 | 0.404684507 | 46 | N | K | 0.450854268 | 0.293319843 |
| 772 | E | G | 0.459510918 | 0.312503946 | 42 | E | [stop] | 0.450047213 | 0.226279727 |
| 369 | A | P | 0.459368992 | 0.154954523 | 20 | K | N | 0.449773662 | 0.196721642 |
| 148 | G | C | 0.459321913 | 0.21989387 | 285 | H | N | 0.44861581 | 0.243329874 |
| 565 | E | [stop] | 0.459284191 | 0.257970072 | 47 | L | V | 0.448453393 | 0.267732388 |
| 472 | K | N | 0.458126194 | 0.217353923 | 953 | D | E | 0.448187279 | 0.183598076 |
| 19 | T | K | 0.458002489 | 0.250652905 | 8 | K | E | 0.447865624 | 0.173510738 |
| 550 | F | L | 0.457885561 | 0.135416611 | 255 | K | N | 0.447654062 | 0.257753112 |
| 642 | E | D | 0.457477443 | 0.18048994 | 965 | Y | [stop] | 0.447638184 | 0.206848878 |
| 761 | F | L | 0.457399802 | 0.126293846 | 381 | L | V | 0.447548148 | 0.24623578 |
| 104 | P | H | 0.457206235 | 0.205670388 | 938 | Q | K | 0.44750144 | 0.297903846 |
| 588 | G | C | 0.457151433 | 0.254991865 | 719 | S | C | 0.4472033 | 0.232249869 |
| 516 | F | L | 0.456927783 | 0.127509134 | 89 | Q | K | 0.447094951 | 0.222907496 |
| 147 | K | N | 0.456444496 | 0.280029247 | 735 | R | L | 0.447058488 | 0.220193339 |
| 651 | P | H | 0.456356549 | 0.186081926 | 673 | E | G | 0.446968171 | 0.213951556 |
| 2 | E | D | 0.456056175 | 0.35763481 | 126 | G | C | 0.446802066 | 0.204738022 |
| 643 | V | G | 0.455368156 | 0.295796806 | 919 | H | D | 0.446668628 | 0.327432207 |
| 524 | K | N | 0.45482233 | 0.143701874 | 23 | G | V | 0.446595867 | 0.2102612 |
| 18 | N | K | 0.454706199 | 0.199478283 | 733 | M | 1 | 0.446594817 | 0.174646778 |
| 5 | R | T | 0.45449471 | 0.277079709 | 490 | R | G | 0.435740618 | 0.182925074 |
| 310 | Q | E | 0.446297431 | 0.123674296 | 789 | E | G | 0.435579914 | 0.162786893 |
| 729 | L | V | 0.445993097 | 0.433135394 | 603 | -- | LE | 0.43556049 | 0.202470667 |
| 455 | W | L | 0.445597501 | 0.281894997 | 442 | R | S | 0.435504028 | 0.210966357 |
| 215 | G | V | 0.445352945 | 0.205217458 | 714 | R | I | 0.435462316 | 0.200883442 |
| 135 | P | T | 0.44528202 | 0.217449002 | 8 | K | R | 0.435212211 | 0.195908908 |
| 936 | R | T | 0.445259832 | 0.32221387 | 854 | N | D | 0.43513717 | 0.067943636 |
| 519 | Q | K | 0.444720886 | 0.28933765 | 335 | E | [stop] | 0.434927464 | 0.21407853 |
| 656 | G | R | 0.444552088 | 0.279063867 | 915 | G | R | 0.434895859 | 0.195491247 |
| 613 | G | R | 0.444378039 | 0.117584873 | 762 | G | C | 0.434868342 | 0.215911162 |
| 16 | D | Y | 0.44433236 | 0.241975919 | 3 | I | T | 0.434607673 | 0.107252687 |
| 5 | R | K | 0.443724261 | 0.262708705 | 406 | E | [stop] | 0.434574625 | 0.271888642 |
| 3 | I | M | 0.443191661 | 0.128675121 | 710 | V | A | 0.434488312 | 0.161462791 |
| 523 | V | L | 0.443126307 | 0.088900743 | 594 | E | Q | 0.434478655 | 0.199232108 |
| 760 | G | C | 0.442544743 | 0.174174731 | 601 | L | M | 0.433295669 | 0.21298138 |
| 27 | P | T | 0.442229152 | 0.271402709 | 194 | --- | DFY | 0.433205 | 0.315807396 |
| 694 | G | D | 0.441607057 | 0.430247861 | 79 | A | S | 0.433187114 | 0.14702693 |
| 695 | E | D | 0.440698297 | 0.174763691 | 913 | NC | FS | 0.432811714 | 0.214195068 |
| 96 | M | I | 0.440309501 | 0.212758418 | 955 | R | S | 0.432632415 | 0.15138175 |
| 234 | G | V | 0.44028737 | 0.19450919 | 793 | ------ | SKTYL (SEQ | 0.432421193 | 0.207758327 |
| | | | | | | | ID NO: 3715) | | |
| 385 | E | D | 0.440128169 | 0.19408182 | 171 | P | H | 0.432364213 | 0.194710101 |
| 744 | Y | H | 0.439198298 | 0.25211241 | 560 | N | S | 0.432346515 | 0.239882019 |
| 519 | Q | H | 0.438343378 | 0.164581049 | 370 | --- | GYK | 0.432297106 | 0.219290605 |
| 385 | E | [stop] | 0.438258279 | 0.212771705 | 321 | P | Q | 0.432271564 | 0.211438092 |
| 793 | S | R | 0.438010456 | 0.160112082 | 979 | LE[stop]GS- | VSSKDLRA | 0.432126183 | 0.250028634 |
| | | | | | | PG (SEQ ID | (SEQ ID NO: | | |
| | | | | | | NO: 3251) | 3820) | | |
| 726 | A | S | 0.437983799 | 0.129329735 | 21 | K | E | 0.431813708 | 0.20570077 |
| 953 | D | Y | 0.437888499 | 0.29124605 | 348 | C | W | 0.431395847 | 0.285738532 |
| 203 | E | [stop] | 0.437866757 | 0.193004717 | 712 | Q | E | 0.430794328 | 0.137430622 |
| 887 | G | V | 0.437831028 | 0.150855683 | 867 | V | A | 0.430546539 | 0.112438125 |
| 189 | G | R | 0.437816984 | 0.195105194 | 902 | H | N | 0.430482041 | 0.210989962 |
| 672 | P | L | 0.437768207 | 0.1420574 | 232 | C | R | 0.430431738 | 0.130635142 |
| 906 | Q | R | 0.437668081 | 0.257388395 | 164 | E | [stop] | 0.43010378 | 0.307258004 |
| 887 | G | R | 0.436446894 | 0.261046568 | 926 | L | V | 0.42049552 | 0.169568285 |
| 6 | I | T | 0.436255483 | 0.311769796 | 873 | S | R | 0.420222785 | 0.189220359 |
| 751 | M | R | 0.436212653 | 0.194544034 | 823 | R | G | 0.420141589 | 0.140425724 |
| 115 | V | A | 0.436134597 | 0.191229151 | 703 | T | A | 0.419927183 | 0.299947391 |
| 348 | C | R | 0.429790014 | 0.254295816 | 265 | K | N | 0.419762272 | 0.205398427 |
| 13 | L | R | 0.429496589 | 0.209797858 | 904 | P | L | 0.419717349 | 0.24717221 |
| 11 | R | W | 0.429311947 | 0.298268587 | 315 | G | A | 0.419275038 | 0.167267502 |
| 944 | Q | E | 0.429084418 | 0.194128082 | 346 | M | I | 0.418933456 | 0.153077303 |
| 974 | K | E | 0.428778767 | 0.120819051 | 301 | V | A | 0.418922077 | 0.253824177 |
| 935 | L | M | 0.428357966 | 0.408223034 | 545 | I | M | 0.418607437 | 0.264461321 |
| 131 | Q | E | 0.427961752 | 0.108783149 | 676 | P | T | 0.41817469 | 0.167866208 |
| 961 | W | R | 0.427770336 | 0.153009954 | 516 | F | S | 0.418152987 | 0.18301751 |
| 508 | F | L | 0.427277307 | 0.150834085 | 790 | G | V | 0.417872524 | 0.17800118 |
| 732 | D | Y | 0.427260152 | 0.232782252 | 890 | G | V | 0.417424955 | 0.242331279 |
| 876 | S | G | 0.427219565 | 0.1654476 | 684 | L | P | 0.41697175 | 0.237298169 |
| 36 | M | I | 0.426965901 | 0.18021585 | 369 | A | T | 0.416965887 | 0.158164268 |
| 699 | E | [stop] | 0.426936027 | 0.247620152 | 890 | G | R | 0.416918523 | 0.30183511 |
| 624 | R | G | 0.426915666 | 0.161800086 | 515 | A | T | 0.416763488 | 0.158965629 |
| 687 | ----- | PTHTL (SEQ | 0.426399688 | 0.235010897 | | | | | |
| | | ID NO: 3626) | | | | | | | |
| 176 | A | G | 0.425859136 | 0.154112817 | 903 | R | G | 0.416689964 | 0.149830948 |
| 256 | K | N | 0.425760398 | 0.195398586 | 898 | K | [stop] | 0.416641263 | 0.154852179 |
| 904 | P | A | 0.425684716 | 0.273763449 | 632 | L | V | 0.416523782 | 0.131108293 |
| 859 | Q | K | 0.425619083 | 0.166409301 | 126 | G | D | 0.41639346 | 0.171080754 |
| 222 | G | [stop] | 0.425285813 | 0.299517445 | 151 | H | R | 0.41621118 | 0.192083944 |
| 20 | K | E | 0.425128158 | 0.147645138 | 480 | L | P | 0.4153828 | 0.153349872 |
| 327 | G | C | 0.425002655 | 0.239317573 | 569 | M | T | 0.415261579 | 0.12705723 |
| 530 | L | P | 0.423859206 | 0.240275284 | 819 | A | S | 0.414776737 | 0.173259385 |
| 175 | E | Q | 0.423850119 | 0.242087732 | 212 | E | [stop] | 0.414560972 | 0.214325617 |
| 797 | L | P | 0.423394833 | 0.254739368 | 104 | P | T | 0.414121539 | 0.241680787 |
| 351 | K | M | 0.423313443 | 0.177944606 | 765 | G | A | 0.413859942 | 0.202334164 |
| 912 | L | M | 0.423204978 | 0.27824291 | 862 | -- | VK | 0.413059952 | 0.195129021 |
| 188 | F | L | 0.422539663 | 0.187750751 | 210 | P | A | 0.412638448 | 0.228860931 |
| 850 | I | M | 0.422459968 | 0.218452121 | 824 | V | A | 0.412207035 | 0.173953175 |
| 391 | K | N | 0.422162984 | 0.158915852 | 736 | N | K | 0.411883437 | 0.18403448 |
| 894 | - | S | 0.42194087 | 0.23660887 | 13 | L | H | 0.411795935 | 0.405614507 |
| 758 | S | R | 0.420859106 | 0.119214586 | 844 | L | V | 0.411372197 | 0.244473235 |
| 941 | K | N | 0.420814047 | 0.266042931 | 973 | W | L | 0.403521777 | 0.16358494 |
| 381 | L | P | 0.42076192 | 0.122089029 | 976 | A | S | 0.403444209 | 0.261893297 |
| 564 | G | C | 0.411344604 | 0.228204596 | 180 | L | P | 0.403389637 | 0.163854455 |
| 694 | G | R | 0.41123482 | 0.211796515 | 220 | A | S | 0.402957864 | 0.279961071 |
| 977 | V | L | 0.411157664 | 0.380351062 | 894 | ------ | SLLKK (SEQ | 0.402797711 | 0.216370575 |
| | | | | | | | ID NO: 3720) | | |
| 142 | E | K | 0.410509302 | 0.15102557 | 739 | R | I | 0.402772732 | 0.234602886 |
| 4 | K | E | 0.410380978 | 0.274892917 | 548 | E | [stop] | 0.402765683 | 0.262561545 |
| 890 | G | D | 0.410337543 | 0.240602631 | 764 | Q | K | 0.402617217 | 0.220740512 |
| 409 | H | D | 0.410132391 | 0.22531365 | 723 | A | D | 0.402461227 | 0.236080429 |
| 563 | S | C | 0.409998896 | 0.206123321 | 934 | F | L | 0.402458138 | 0.384373835 |
| 793 | S | N | 0.409457982 | 0.067541166 | 42 | E | D | 0.401939693 | 0.171540664 |
| 705 | Q | H | 0.409365382 | 0.15278139 | 956 | A | G | 0.401859954 | 0.23877341 |
| 515 | A | D | 0.409252018 | 0.206051204 | 771 | A | D | 0.401428057 | 0.231350403 |
| 382 | S | R | 0.408669778 | 0.157144259 | 15 | K | M | 0.401237871 | 0.256454456 |
| 97 | S | N | 0.408564877 | 0.109922347 | 298 | A | V | 0.401000777 | 0.140487597 |
| 624 | R | I | 0.40845718 | 0.228955853 | 128 | A | P | 0.400992369 | 0.173078759 |
| 568 | P | T | 0.408066084 | 0.284742394 | 511 | Q | H | 0.400978135 | 0.171613013 |
| 702 | R | S | 0.408063786 | 0.129537489 | 26 | G | V | 0.400800405 | 0.212307845 |
| 796 | Y | N | 0.40788333 | 0.311628718 | 591 | ------ | QGREFI (SEQ | 0.400574847 | 0.190655853 |
| | | | | | | | ID NO: 3636) | | |
| 897 | K | R | 0.407876662 | 0.136002906 | 156 | G | S | 0.400389686 | 0.306653761 |
| 292 | A | V | 0.407642755 | 0.163883385 | 728 | N | S | 0.400298817 | 0.177178828 |
| 741 | L | Q | 0.407532982 | 0.11928093 | 917 | ------ | ETHADE | 0.400170477 | 0.15562198 |
| | | | | | | | (SEQ ID NO: | | |
| | | | | | | | 3401) | | |
| 315 | G | C | 0.407147181 | 0.218556644 | 640 | R | G | 0.399931978 | 0.200741 |
| -1 | S | Y | 0.407080752 | 0.324937034 | 254 | I | M | 0.39981124 | 0.209846066 |
| 945 | T | I | 0.407011152 | 0.285905433 | 644 | L | P | 0.399481964 | 0.165702888 |
| 695 | E | [stop] | 0.406081569 | 0.227028835 | 549 | A | S | 0.399416255 | 0.189530269 |
| 956 | A | S | 0.405686952 | 0.185566124 | 528 | L | V | 0.399354304 | 0.147818268 |
| 752 | L | M | 0.405575007 | 0.172103348 | 502 | I | V | 0.399285899 | 0.256373682 |
| 45 | E | [stop] | 0.405531899 | 0.162357698 | 79 | A | D | 0.399080303 | 0.154917165 |
| 487 | G | C | 0.405450681 | 0.290615306 | 753 | I | M | 0.399024046 | 0.268887392 |
| 310 | Q | R | 0.405123752 | 0.12048192 | 588 | G | D | 0.398941525 | 0.112261489 |
| 791 | L | P | 0.404916001 | 0.108993438 | 873 | S | G | 0.392619693 | 0.143564629 |
| 767 | R | I | 0.404746394 | 0.223610078 | 414 | G | D | 0.392615344 | 0.149137614 |
| 538 | G | C | 0.404409405 | 0.233295785 | 237 | A | G | 0.392578525 | 0.167793454 |
| 584 | P | A | 0.403953066 | 0.108926305 | 479 | E | [stop] | 0.392365621 | 0.272905538 |
| 552 | A | D | 0.403929388 | 0.192995621 | 752 | L | V | 0.392234134 | 0.171880044 |
| 648 | N | D | 0.403814843 | 0.290734901 | 692 | R | I | 0.391963575 | 0.221910688 |
| 722 | Y | H | 0.398538883 | 0.164012123 | 683 | s | Y | 0.39187962 | 0.197184801 |
| 550 | - | G | 0.398527591 | 0.353355602 | 568 | P | s | 0.391506615 | 0.094807068 |
| 133 | C | R | 0.398285042 | 0.283233819 | 114 | P | T | 0.391456539 | 0.163794482 |
| 591 | -- | QG | 0.398079043 | 0.133460692 | 341 | V | A | 0.391246425 | 0.087691935 |
| 877 | V | L | 0.398057665 | 0.212468549 | 50 | K | R | 0.39108021 | 0.159163965 |
| 958 | V | A | 0.398007545 | 0.130004197 | 698 | K | R | 0.390885992 | 0.181654156 |
| 903 | R | I | 0.39789959 | 0.321002606 | 979 | L- | V[stop] | 0.3907803 | 0.18994351 |
| 118 | G | D | 0.397657151 | 0.192339782 | 932 | W | G | 0.390757599 | 0.185057669 |
| 745 | A | S | 0.397594938 | 0.285476509 | 519 | Q | R | 0.390675235 | 0.117792262 |
| 914 | C | F | 0.397278541 | 0.29475166 | 140 | K | E | 0.390615529 | 0.123713502 |
| 461 | --- | SFV | 0.39704755 | 0.20205322 | 40 | L | P | 0.390579865 | 0.194510846 |
| 637 | --- | TFE | 0.396824735 | 0.209304074 | 978 | - | [stop] | 0.390537744 | 0.255501032 |
| 855 | R | M | 0.396780958 | 0.191874811 | 509 | S | T | 0.390466368 | 0.117704569 |
| 142 | E | [stop] | 0.396624103 | 0.229993954 | 465 | E | [stop] | 0.390424913 | 0.211758729 |
| 108 | D | N | 0.396298431 | 0.15939576 | 88 | F | S | 0.390363974 | 0.156430305 |
| 730 | ------- | ADDMVRN | 0.395727458 | 0.207712648 | 429 | E | [stop] | 0.390336598 | 0.135919503 |
| | | (SEQ ID NO: | | | | | | | |
| | | 3305) | | | | | | | |
| 241 | T | I | 0.395690613 | 0.131948289 | 783 | --- | TAK | 0.390178711 | 0.143499076 |
| 641 | R | I | 0.395315387 | 0.202249461 | 442 | R | M | 0.390097432 | 0.262199628 |
| 364 | F | L | 0.395209211 | 0.112951976 | 453 | T | A | 0.389911631 | 0.312187594 |
| 739 | R | G | 0.395162717 | 0.191317885 | 923 | Q | H | 0.389855175 | 0.353446475 |
| 446 | A | S | 0.39510798 | 0.254001902 | 666 | V | A | 0.389840585 | 0.169825945 |
| 593 | R | [stop] | 0.395071199 | 0.196636879 | 499 | E | D | 0.38958943 | 0.172940321 |
| 168 | L | P | 0.39502304 | 0.27101743 | 930 | R | G | 0.389517964 | 0.2357312 |
| 890 | G | C | 0.394653545 | 0.224530018 | 847 | ------ | EGQITY | 0.389324278 | 0.122951036 |
| | | | | | | | (SEQ ID NO: | | |
| | | | | | | | 3387) | | |
| 677 | -- | LS | 0.394551417 | 0.187547463 | 846 | V | L | 0.389120343 | 0.259313474 |
| 47 | L | R | 0.394492318 | 0.238759289 | 908 | K | N | 0.38907418 | 0.225076472 |
| 339 | N | S | 0.394482682 | 0.152047471 | 975 | P | T | 0.388901662 | 0.256059318 |
| 316 | R | G | 0.394439897 | 0.159274636 | 783 | T | R | 0.381262501 | 0.118770396 |
| 206 | H | N | 0.394299838 | 0.156799046 | 916 | F | V | 0.380756944 | 0.281228145 |
| 651 | P | A | 0.394024946 | 0.151434436 | 450 | A | T | 0.38074186 | 0.136570467 |
| 441 | R | G | 0.393551449 | 0.150649913 | 906 | Q | E | 0.380700478 | 0.285392821 |
| 325 | L | P | 0.393343386 | 0.140601419 | 29 | K | [stop] | 0.380574061 | 0.171976662 |
| 589 | K | N | 0.3926379 | 0.261890195 | 936 | R | I | 0.38042421 | 0.204558309 |
| 149 | K | N | 0.38882454 | 0.171027465 | 754 | F | I | 0.380277272 | 0.145574058 |
| 691 | L | P | 0.388805401 | 0.14397393 | 315 | G | S | 0.380117687 | 0.143338421 |
| 207 | P | A | 0.387921412 | 0.102883658 | 89 | Q | [stop] | 0.379768129 | 0.102222221 |
| 11 | - | S | 0.387747808 | 0.379461072 | 289 | G | C | 0.379664161 | 0.235845043 |
| 638 | F | L | 0.387272475 | 0.168477543 | 750 | A | T | 0.379378398 | 0.182932261 |
| 558 | V | L | 0.386662896 | 0.254612529 | 216 | G | C | 0.379274317 | 0.176888646 |
| 816 | I | V | 0.386659025 | 0.185203822 | 303 | W | C | 0.379215164 | 0.182222922 |
| 680 | F | L | 0.386638685 | 0.211225716 | 295 | N | K | 0.379144284 | 0.378487654 |
| 329 | P | T | 0.386489681 | 0.220048383 | 919 | H | Y | 0.379137691 | 0.321018649 |
| 576 | D | G | 0.386151413 | 0.113653327 | 726 | A | D | 0.379067543 | 0.145080733 |
| 225 | G | V | 0.386137184 | 0.239109613 | 133 | C | S | 0.378841599 | 0.162936296 |
| 22 | A | G | 0.385839168 | 0.336984972 | 497 | E | [stop] | 0.378292682 | 0.202801468 |
| 146 | D | E | 0.385277721 | 0.095712474 | 444 | E | K | 0.378042967 | 0.318660643 |
| 507 | G | R | 0.385233777 | 0.212044464 | 693 | I | M | 0.378036899 | 0.225823359 |
| 523 | V | I | 0.385109283 | 0.152511446 | 587 | F | L | 0.377947216 | 0.117981043 |
| 501 | S | G | 0.385073546 | 0.140125388 | 291 | E | D | 0.377733323 | 0.142365006 |
| 763 | R | L | 0.38502172 | 0.191531655 | 85 | W | S | 0.377648166 | 0.097279693 |
| 705 | Q | E | 0.384851421 | 0.17568818 | 165 | R | M | 0.377647305 | 0.161201002 |
| 82 | H | D | 0.383907018 | 0.103874584 | 569 | M | I | 0.377387614 | 0.195898876 |
| 794 | K | N | 0.383803253 | 0.195192527 | 247 | I | T | 0.37729282 | 0.165305688 |
| 979 | LE[stop]GSPG | VSSKDLR | 0.38375861 | 0.240184851 | 513 | - | N | 0.377106209 | 0.14731404 |
| | (SEQ ID NO: | (SEQ ID NO: | | | | | | | |
| | 3251) | 3819) | | | | | | | |
| 894 | S | R | 0.383344078 | 0.273603195 | 754 | F | L | 0.376911731 | 0.164266559 |
| 639 | E | [stop] | 0.383174826 | 0.193125393 | 21 | K | [stop] | 0.376868031 | 0.199468055 |
| 655 | I | M | 0.383102617 | 0.208514699 | 268 | A | T | 0.376839819 | 0.129211081 |
| 261 | L | V | 0.382856978 | 0.19611714 | 672 | P | T | 0.376830532 | 0.204970386 |
| 480 | L | R | 0.382841683 | 0.252187108 | 735 | R | [stop] | 0.376814295 | 0.09621637 |
| 489 | L | V | 0.38262991 | 0.16124555 | 147 | K | E | 0.376789616 | 0.140417542 |
| 134 | Q | E | 0.382580711 | 0.180510987 | 904 | P | R | 0.37666328 | 0.185106225 |
| 650 | -- | PA | 0.382487274 | 0.372015728 | 712 | Q | H | 0.376030218 | 0.227827888 |
| 630 | P | H | 0.381699363 | 0.211396524 | 92 | P | T | 0.368981275 | 0.236532466 |
| 21 | K | R | 0.381603442 | 0.1634713 | 292 | A | T | 0.36879806 | 0.193425471 |
| 677 | --- | LSR | 0.381372384 | 0.163400905 | 465 | E | D | 0.368752489 | 0.224455423 |
| 284 | P | T | 0.381276843 | 0.171865261 | 189 | -------- | GQRALDFY | 0.368745456 | 0.227136846 |
| | | | | | | | (SEQ ID NO: | | |
| | | | | | | | 3448) | | |
| 2 | E | V | 0.375325693 | 0.197955097 | 805 | T | A | 0.368671629 | 0.11272788 |
| 184 | S | I | 0.375300851 | 0.252137747 | 947 | K | E | 0.368551642 | 0.227968732 |
| 163 | H | D | 0.3751698 | 0.208290707 | 148 | G | D | 0.36788165 | 0.139635081 |
| 677 | L | P | 0.375131489 | 0.090158552 | 129 | C | W | 0.367758112 | 0.199915902 |
| 44 | L | P | 0.374906966 | 0.249472829 | 129 | C | [stop] | 0.367708546 | 0.192643557 |
| 606 | G | V | 0.374739683 | 0.285964981 | 98 | R | T | 0.367673403 | 0.174398036 |
| 937 | S | G | 0.374669762 | 0.248499289 | 478 | C | W | 0.367598979 | 0.111931907 |
| 727 | K | N | 0.374273348 | 0.164838535 | 228 | L | M | 0.367328433 | 0.24869867 |
| 734 | V | A | 0.374244799 | 0.121134147 | 547 | P | H | 0.367324308 | 0.220855574 |
| 902 | H | Q | 0.374087073 | 0.175219897 | 105 | K | N | 0.367245695 | 0.155463083 |
| 398 | F | L | 0.373909011 | 0.239653674 | 597 | W | R | 0.367058721 | 0.142955463 |
| 845 | K | N | 0.373742099 | 0.158752661 | 328 | F | L | 0.366955458 | 0.100787228 |
| 822 | D | N | 0.373424135 | 0.138952336 | 469 | E | [stop] | 0.366917206 | 0.180496612 |
| 136 | L | M | 0.372880562 | 0.202180857 | 130 | S | T | 0.366622403 | 0.127263853 |
| 543 | K | E | 0.372880222 | 0.146877967 | 283 | Q | E | 0.366530641 | 0.247989672 |
| 244 | Q | H | 0.372873077 | 0.184616643 | 958 | V | L | 0.366470474 | 0.270699212 |
| 403 | L | R | 0.372697479 | 0.330913239 | 673 | E | Q | 0.366346139 | 0.219545941 |
| 679 | R | I | 0.372176403 | 0.370324076 | 118 | G | C | 0.366255984 | 0.265748809 |
| 738 | A | D | 0.372074442 | 0.291834989 | 848 | G | V | 0.366195099 | 0.200861406 |
| 155 | F | L | 0.371845015 | 0.114679195 | 923 | Q | L | 0.366184575 | 0.233234243 |
| 174 | P | R | 0.371603352 | 0.137168151 | 357 | K | R | 0.366148171 | 0.185792239 |
| 919 | H | N | 0.371556993 | 0.327290993 | 623 | ------ | RRTRQD | 0.365486053 | 0.26101804 |
| | | | | | | | (SEQ ID NO: | | |
| | | | | | | | 3683) | | |
| 944 | Q | H | 0.37144256 | 0.338788753 | 85 | W | C | 0.365346783 | 0.146084706 |
| 164 | E | G | 0.370935537 | 0.216755032 | 376 | ----- | ALLPY (SEQ | 0.365321474 | 0.191317647 |
| | | | | | | | ID NO: 3319) | | |
| 197 | S | G | 0.370856052 | 0.178568608 | 356 | E | D | 0.365050343 | 0.136074432 |
| 840 | N | K | 0.370814634 | 0.142530771 | 262 | A | S | 0.365012551 | 0.204615446 |
| 13 | L | M | 0.370495333 | 0.29466367 | 774 | Q | K | 0.359747336 | 0.182131652 |
| 488 | D | N | 0.370055302 | 0.226946737 | 439 | E | D | 0.359587685 | 0.134619305 |
| 929 | A | P | 0.370027168 | 0.168555798 | 198 | I | T | 0.359370526 | 0.173615874 |
| 580 | L | V | 0.36995513 | 0.139984948 | 156 | G | C | 0.359055571 | 0.173590319 |
| 135 | P | A | 0.369933138 | 0.10604161 | 399 | G | C | 0.358922413 | 0.255017848 |
| 342 | D | Y | 0.369924443 | 0.189241086 | 59 | S | T | 0.358703019 | 0.109042363 |
| 959 | ET | AV | 0.369879201 | 0.114167508 | 93 | V | M | 0.358615623 | 0.161948363 |
| 557 | T | A | 0.369640872 | 0.087836911 | 674 | G | [stop] | 0.358503233 | 0.220631194 |
| 6 | I | V | 0.369460173 | 0.192497769 | 539 | K | N | 0.358074633 | 0.087009621 |
| 765 | G | S | 0.3649426 | 0.100657536 | 709 | E | D | 0.357944736 | 0.136689683 |
| 717 | ---- | GYSR (SEQ | 0.364903794 | 0.186125273 | 120 | E | G | 0.357933511 | 0.168382586 |
| | | ID NO: 3457) | | | | | | | |
| 199 | H | Y | 0.364586783 | 0.168211628 | 494 | F | L | 0.357874746 | 0.139367085 |
| 796 | Y | H | 0.364521403 | 0.145575579 | 272 | G | V | 0.357428523 | 0.207170798 |
| 237 | A | P | 0.364453395 | 0.150681341 | 527 | N | I | 0.357320226 | 0.086164887 |
| 768 | T | A | 0.36435574 | 0.18512185 | 236 | V | A | 0.357249373 | 0.125737046 |
| 513 | N | D | 0.364305814 | 0.16260499 | 974 | K | N | 0.357242055 | 0.190403244 |
| 823 | RV | LS | 0.364237044 | 0.11377221 | 10 | RR | PG | 0.356712463 | 0.324298272 |
| 656 | G | A | 0.364010939 | 0.135958583 | 39 | D | Y | 0.356585187 | 0.235756832 |
| 276 | P | T | 0.363878534 | 0.201304545 | 579 | N | S | 0.3558347 | 0.181516226 |
| 214 | I | V | 0.363876419 | 0.142178855 | 214 | I | M | 0.355779849 | 0.142887254 |
| 300 | I | V | 0.363823907 | 0.234997169 | 843 | E | [stop] | 0.355689249 | 0.225441771 |
| 769 | F | S | 0.363687361 | 0.079831237 | 526 | ---- | LNLY (SEQ | 0.355597159 | 0.179351732 |
| | | | | | | | ID NO: 3563) | | |
| 182 | T | R | 0.363686071 | 0.201742372 | 667 | I | M | 0.355548811 | 0.239632986 |
| 677 | L | V | 0.363578004 | 0.138045802 | 559 | I | V | 0.355478406 | 0.171281999 |
| 796 | Y | C | 0.363566923 | 0.281557418 | 706 | A | S | 0.355431605 | 0.116949175 |
| 5 | R | S | 0.363258223 | 0.211185531 | 11 | RR | TS | 0.35536352 | 0.272262643 |
| 298 | A | S | 0.36320777 | 0.211187305 | 865 | L | Q | 0.355287262 | 0.164676142 |
| 594 | E | [stop] | 0.36278807 | 0.205352129 | 946 | N | K | 0.355277474 | 0.180093688 |
| 105 | K | R | 0.362205009 | 0.140104618 | 689 | HI | PV | 0.355052108 | 0.144577201 |
| 907 | E | Q | 0.362024887 | 0.226228418 | 898 | K | N | 0.354894826 | 0.200062158 |
| 509 | S | G | 0.361807445 | 0.13953396 | 950 | -- | GN | 0.354845909 | 0.167057981 |
| 110 | R | I | 0.361752083 | 0.138681372 | 332 | P | T | 0.354796362 | 0.20270742 |
| 406 | E | Q | 0.361750488 | 0.303638253 | 323 | Q | E | 0.354759964 | 0.249399571 |
| 470 | A | V | 0.361349462 | 0.10686226 | 42 | E | A | 0.354721226 | 0.213005644 |
| 4 | K | [stop] | 0.36129388 | 0.179352157 | 644 | L | V | 0.351676716 | 0.163471035 |
| 362 | K | E | 0.361196668 | 0.232368389 | 78 | K | E | 0.35167205 | 0.128519193 |
| 713 | R | G | 0.3607467 | 0.181817788 | 272 | G | C | 0.351365895 | 0.208785029 |
| 857 | K | N | 0.360715256 | 0.172046815 | 157 | -------- | RCNVSEHE | 0.351115058 | 0.126463217 |
| | | | | | | | (SEQ ID NO: | | |
| | | | | | | | 3661) | | |
| 120 | E | D | 0.36030686 | 0.214810208 | 883 | S | R | 0.351093302 | 0.143213807 |
| 277 | K | E | 0.36002957 | 0.210892547 | 917 | E | V | 0.350763439 | 0.206641731 |
| 477 | RCELK (SEQ | SFSSH (SEQ | 0.360015336 | 0.177473578 | 843 | E | D | 0.350569244 | 0.142523946 |
| | ID NO: 3285) | ID NO: 3696) | | | | | | | |
| 532 | I | T | 0.359759307 | 0.145072322 | 870 | D | Y | 0.350431061 | 0.194706521 |
| 22 | A | T | 0.354629728 | 0.083320918 | 393 | F | V | 0.35027948 | 0.168738586 |
| 948 | T | S | 0.354488334 | 0.198422577 | 162 | E | K | 0.350236681 | 0.12523983 |
| 16 | D | E | 0.354450775 | 0.187189495 | 119 | N | D | 0.350147467 | 0.235898677 |
| 170 | S | Y | 0.354344814 | 0.160709939 | 306 | L | M | 0.349889759 | 0.165537841 |
| 862 | | VKDLS (SEQ | 0.354059938 | 0.179170942 | 110 | R | T | 0.349523294 | 0.289863999 |
| | | ID NO: 3781) | | | | | | | |
| 249 | E | [stop] | 0.354016591 | 0.294486267 | 976 | A | D | 0.34941868 | 0.241042383 |
| 531 | I | M | 0.353941253 | 0.095481374 | 914 | C | W | 0.349231308 | 0.169568161 |
| 266 | D | H | 0.35392753 | 0.237329699 | 115 | V | M | 0.349160578 | 0.17839763 |
| 859 | Q | E | 0.353923377 | 0.126451964 | 863 | K | N | 0.348978081 | 0.175915912 |
| 113 | I | V | 0.353631334 | 0.187941798 | 830 | K | R | 0.348789882 | 0.11782242 |
| 136 | L | P | 0.353572714 | 0.240617705 | 564 | G | S | 0.348654331 | 0.240781896 |
| 503 | L | M | 0.353400839 | 0.174768283 | 647 | S | I | 0.348570495 | 0.163208612 |
| 51 | P | R | 0.353321532 | 0.126698252 | 617 | E | D | 0.348384104 | 0.103608149 |
| 179 | E | D | 0.353270131 | 0.108592116 | 262 | A | T | 0.348231917 | 0.222328473 |
| 31 | L | V | 0.353260601 | 0.168619621 | 713 | R | I | 0.348163293 | 0.202182526 |
| 502 | I | F | 0.353258477 | 0.139633145 | 893 | L | P | 0.348133135 | 0.24849422 |
| 378 | L | M | 0.353221613 | 0.189998728 | 202 | R | G | 0.347997162 | 0.177282082 |
| 890 | G | A | 0.353138339 | 0.149947604 | 806 | S | Y | 0.347673828 | 0.200543155 |
| 913 | N | K | 0.353092797 | 0.294888192 | 391 | K | R | 0.347608788 | 0.122435715 |
| 956 | A | D | 0.352997131 | 0.204713576 | 683 | S | C | 0.34755615 | 0.102168244 |
| 158 | C | W | 0.352758393 | 0.130405614 | 446 | A | T | 0.347296208 | 0.236243043 |
| 157 | ---- | RCNV (SEQ | 0.352566351 | 0.116984328 | 282 | P | A | 0.347073665 | 0.253113968 |
| | | ID NO: 3658) | | | | | | | |
| 771 | A | G | 0.352390901 | 0.141133059 | 580 | L | P | 0.347062657 | 0.078573865 |
| 227 | A | G | 0.352335693 | 0.141777326 | 895 | L | P | 0.347059979 | 0.152424473 |
| 202 | RE | G- | 0.352321171 | 0.210660545 | 929 | A | T | 0.34702013 | 0.306789031 |
| 99 | V | F | 0.352314021 | 0.162936095 | 555 | F | L | 0.343270194 | 0.098281937 |
| 643 | V | E | 0.352268894 | 0.209333581 | 294 | N | D | 0.343264324 | 0.126839815 |
| 41 | R | I | 0.352205261 | 0.321737078 | 553 | N | D | 0.342736197 | 0.153294035 |
| 387 | R | P | 0.352184692 | 0.159814147 | 893 | L | M | 0.342736077 | 0.179172833 |
| 539 | K | E | 0.351957196 | 0.146275596 | 951 | N | K | 0.342592943 | 0.278844401 |
| 478 | C | F | 0.351788403 | 0.313141443 | 51 | P | T | 0.342576973 | 0.1929364 |
| 942 | K | E | 0.351775756 | 0.256493816 | 649 | I | T | 0.342534817 | 0.270208479 |
| 36 | M | I | 0.351715805 | 0.097577134 | 175 | E | D | 0.342455704 | 0.202360388 |
| 108 | D | Y | 0.347014656 | 0.291577591 | 823 | R | S | 0.341965728 | 0.273152096 |
| 258 | E | [stop] | 0.34694757 | 0.281979872 | 219 | C | R | 0.341954249 | 0.136482174 |
| 673 | E | A | 0.346691172 | 0.265253287 | 283 | Q | R | 0.341949927 | 0.224313066 |
| 950 | G | D | 0.346646349 | 0.128298199 | 444 | E | [stop] | 0.341881438 | 0.217688103 |
| 792 | P | T | 0.346487957 | 0.236073016 | 649 | I | V | 0.341655494 | 0.148589673 |
| 673 | E | [stop] | 0.346388527 | 0.198074161 | 854 | N | K | 0.341614877 | 0.157948422 |
| 150 | P | R | 0.34632855 | 0.278480507 | 514 | C | S | 0.34160113 | 0.231141571 |
| 456 | L | P | 0.345951509 | 0.161500864 | 623 | ---- | RRTR (SEQ | 0.341527608 | 0.187073234 |
| | | | | | | | ID NO: 3681) | | |
| 790 | G | R | 0.345911786 | 0.179210019 | 585 | L | M | 0.341496703 | 0.21431877 |
| 647 | S | T | 0.345819661 | 0.158521168 | 211 | -- | LE | 0.341207432 | 0.169230112 |
| 542 | F | S | 0.345619595 | 0.191970857 | 544 | K | E | 0.341142267 | 0.208342511 |
| 841 | G | D | 0.345447865 | 0.129392183 | 478 | C | R | 0.341091687 | 0.148433288 |
| 57 | P | A | 0.345371652 | 0.147875225 | 858 | R | G | 0.340977066 | 0.206052559 |
| 578 | P | R | 0.345346371 | 0.12075926 | 172 | H | D | 0.340873936 | 0.298188428 |
| 793 | S | I | 0.345235059 | 0.262377638 | 16 | D | A | 0.340771918 | 0.308121625 |
| 453 | T | S | 0.345118763 | 0.097101409 | 525 | K | N | 0.340626838 | 0.147516442 |
| 651 | P | R | 0.345088622 | 0.208316961 | 532 | I | V | 0.340576058 | 0.099088927 |
| 556 | Y | [stop] | 0.345070339 | 0.114662396 | 520 | K | [stop] | 0.34056167 | 0.228510512 |
| 86 | E | [stop] | 0.344943839 | 0.21976554 | 743 | Y | [stop] | 0.340397436 | 0.102396798 |
| 646 | S | G | 0.344888595 | 0.154435246 | 344 | W | C | 0.340364668 | 0.176812201 |
| 592 | G | C | 0.34478874 | 0.240350052 | 220 | A | G | 0.340276978 | 0.133945921 |
| 49 | K | N | 0.344659946 | 0.130706516 | 186 | G | V | 0.340265085 | 0.116877863 |
| 586 | A | D | 0.344294219 | 0.15117877 | 694 | G | C | 0.340225482 | 0.309935909 |
| 166 | L | V | 0.34415435 | 0.139737754 | 411 | E | Q | 0.340144727 | 0.282548314 |
| 726 | A | P | 0.344144415 | 0.164178243 | 406 | E | G | 0.340120492 | 0.140875629 |
| 666 | V | L | 0.344130904 | 0.155760915 | 573 | F | L | 0.340030507 | 0.166015227 |
| 749 | D | H | 0.344052929 | 0.242192495 | 52 | E | [stop] | 0.336207682 | 0.211986135 |
| 486 | Y | C | 0.34395063 | 0.130965705 | 299 | Q | E | 0.336024324 | 0.156699489 |
| 134 | Q | K | 0.343594633 | 0.210709609 | 183 | YS | WM | 0.335855997 | 0.179538112 |
| 91 | D | H | 0.34352508 | 0.153686099 | 194 | D | Y | 0.335755348 | 0.131644969 |
| 40 | LR | PV | 0.343506493 | 0.155292328 | 213 | Q | R | 0.335726769 | 0.209853061 |
| 12 | R | T | 0.343490891 | 0.187270573 | 802 | A | D | 0.33571172 | 0.168573673 |
| 653 | N | D | 0.343487264 | 0.148663517 | 163 | H | N | 0.33571123 | 0.197315666 |
| 52 | E | Q | 0.343438912 | 0.247941408 | 943 | Y | C | 0.335604909 | 0.172843558 |
| 8 | K | Q | 0.343298615 | 0.279455517 | 118 | G | S | 0.335544316 | 0.125891126 |
| 458 | A | G | 0.339794018 | 0.171435317 | 758 | S | G | 0.335513561 | 0.149050456 |
| 675 | C | [stop] | 0.339687357 | 0.208292109 | 941 | K | [stop] | 0.335374859 | 0.192348189 |
| 576 | D | Y | 0.339621402 | 0.21774439 | 279 | ------- | TLPPQPH | 0.335305655 | 0.144688363 |
| | | | | | | | (SEQ ID NO: | | |
| | | | | | | | 3755) | | |
| 787 | A | S | 0.339526186 | 0.318305548 | 632 | LF | PV | 0.335263893 | 0.113883053 |
| 537 | G | C | 0.339454064 | 0.174110887 | 894 | ------ | SLLKKR | 0.335263893 | 0.141289409 |
| | | | | | | | (SEQ ID NO: | | |
| | | | | | | | 3721) | | |
| 185 | -- | LG | 0.339451721 | 0.186103153 | 943 | Y | [stop] | 0.335115123 | 0.291608446 |
| 844 | L | P | 0.339318044 | 0.191881119 | 38 | P | R | 0.33481965 | 0.113021039 |
| 712 | Q | K | 0.339288003 | 0.193891353 | 616 | I | F | 0.334790976 | 0.107803908 |
| 591 | Q | R | 0.339223049 | 0.160616368 | 134 | Q | H | 0.334549336 | 0.158461695 |
| 169 | L | P | 0.339210958 | 0.127439702 | 186 | G | C | 0.334321874 | 0.156717674 |
| 923 | ----- | QAALN (SEQ | 0.339143383 | 0.169170821 | 184 | S | G | 0.334296555 | 0.223929833 |
| | | ID NO: 3631) | | | | | | | |
| 623 | R | S | 0.339131953 | 0.245088648 | 765 | G | C | 0.33423513 | 0.213904011 |
| 589 | K | Q | 0.33901987 | 0.177422866 | 687 | P | T | 0.334191461 | 0.22545553 |
| 522 | G | V | 0.338985606 | 0.226282565 | 803 | --- | QYT | 0.33418367 | 0.096860089 |
| 204 | S | T | 0.338673547 | 0.170845305 | 374 | Q | R | 0.334175524 | 0.104826318 |
| 698 | K | E | 0.338580473 | 0.129708045 | 455 | W | C | 0.334165051 | 0.186741008 |
| 497 | E | V | 0.338306724 | 0.13489235 | 552 | ----- | ANRFY (SEQ | 0.333923423 | 0.258649392 |
| | | | | | | | ID NO: 3327) | | |
| 23 | G | S | 0.338162596 | 0.15304761 | 407 | K | R | 0.333913165 | 0.142719617 |
| 29 | K | R | 0.337989172 | 0.147861886 | 175 | E | K | 0.333834455 | 0.196225639 |
| 716 | G | V | 0.337974681 | 0.202399788 | 610 | ----- | LANGR (SEQ | 0.333428825 | 0.102899397 |
| | | | | | | | ID NO: 3536) | | |
| 703 | T | S | 0.337889214 | 0.141977828 | 127 | F | I | 0.329561201 | 0.268089932 |
| 979 | LE[stop]GSPG | VSSKDLE | 0.337814175 | 0.168342402 | 837 | T | S | 0.329510402 | 0.099725089 |
| | (SEQ ID NO: | (SEQ ID NO: | | | | | | | |
| | 3251) | 3805) | | | | | | | |
| 240 | L | M | 0.3377179 | 0.151631422 | 704 | I | T | 0.329114566 | 0.113551049 |
| 950 | G | C | 0.337265205 | 0.234973706 | 387 | R | L | 0.328928103 | 0.199189713 |
| 7 | N | S | 0.337036852 | 0.185037778 | 171 | P | R | 0.328685191 | 0.279786527 |
| 64 | A | P | 0.336967696 | 0.255179815 | 767 | R | T | 0.328611454 | 0.173820273 |
| 795 | T | S | 0.336837648 | 0.117371137 | 597 | W | L | 0.328585458 | 0.282536549 |
| 480 | L | Q | 0.336803159 | 0.213915334 | 955 | R | G | 0.328533511 | 0.252801289 |
| 600 | L | V | 0.336801383 | 0.230766925 | 629 | E | [stop] | 0.328472442 | 0.226070443 |
| 175 | E | [stop] | 0.336712437 | 0.187755487 | 699 | E | G | 0.328340286 | 0.161755276 |
| 63 | R | S | 0.336640982 | 0.183725757 | 564 | G | A | 0.328244232 | 0.11512512 |
| 394 | A | P | 0.336388779 | 0.125201204 | 129 | C | F | 0.327975914 | 0.184885596 |
| 230 | ---- | DACM (SEQ | 0.333428825 | 0.108521075 | 26 | G | S | 0.327861024 | 0.174859434 |
| | | ID NO: 3341) | | | | | | | |
| 848 | G | S | 0.333406808 | 0.165245749 | 199 | H | N | 0.327823226 | 0.25447122 |
| 630 | P | R | 0.333389309 | 0.182782946 | 701 | Q | R | 0.327746296 | 0.151982714 |
| 442 | R | G | 0.333281333 | 0.186150848 | 186 | G | D | 0.327613843 | 0.101552272 |
| 836 | M | T | 0.33320739 | 0.215623837 | 422 | E | D | 0.327579534 | 0.227939955 |
| 222 | G | V | 0.333139545 | 0.173506426 | 924 | A | T | 0.327501843 | 0.29494568 |
| 21 | K | T | 0.333022379 | 0.190202016 | 176 | A | P | 0.32741005 | 0.239900376 |
| 696 | S | I | 0.332955668 | 0.138037632 | 499 | E | K | 0.327284744 | 0.159757942 |
| 635 | A | T | 0.332902532 | 0.130552446 | 546 | K | R | 0.327156617 | 0.166513946 |
| 551 | E | G | 0.332833114 | 0.158314375 | 556 | Y | H | 0.327151432 | 0.118520339 |
| 780 | D | Y | 0.332787267 | 0.203141483 | 548 | --- | EAF | 0.326965289 | 0.171181066 |
| 47 | L | M | 0.332771785 | 0.228474741 | 901 | S | I | 0.326880206 | 0.320148616 |
| 347 | V | L | 0.332766547 | 0.164853137 | 14 | V | I | 0.326870011 | 0.276842054 |
| 841 | G | C | 0.332584425 | 0.2483922 | 814 | F | L | 0.32685269 | 0.084563864 |
| 593 | R | I | 0.332546881 | 0.22140312 | 157 | ------ | RCNVSE | 0.326801479 | 0.200654893 |
| | | | | | | | (SEQ ID NO: | | |
| | | | | | | | 3660) | | |
| 749 | D | Y | 0.332359902 | 0.199451757 | 250 | H | R | 0.326584294 | 0.078102923 |
| 27 | P | S | 0.332358372 | 0.306966339 | 730 | A | V | 0.326443401 | 0.110931779 |
| 276 | P | H | 0.332221583 | 0.26420075 | 497 | E | Q | 0.326193187 | 0.212891542 |
| 293 | Y | [stop] | 0.332046234 | 0.133526657 | 536 | K | R | 0.326129704 | 0.20597101 |
| 3 | I | N | 0.332004357 | 0.072687293 | 906 | Q | P | 0.326073598 | 0.193779388 |
| 642 | ---- | EVLD (SEQ | 0.331972419 | 0.22538863 | 243 | Y | D | 0.326001836 | 0.130392708 |
| | | ID NO: 3404) | | | | | | | |
| 620 | L | P | 0.331807594 | 0.15763111 | 786 | L | Q | 0.32241581 | 0.22201146 |
| 456 | L | V | 0.331754102 | 0.143226803 | 4 | K | M | 0.32231147 | 0.124043743 |
| 130 | S | G | 0.331571239 | 0.167684126 | 781 | W | R | 0.322196176 | 0.263818038 |
| 629 | E | K | 0.33154282 | 0.153428302 | 182 | T | I | 0.322044203 | 0.109310181 |
| 950 | G | V | 0.331464709 | 0.229681218 | 888 | R | G | 0.322001059 | 0.172130189 |
| 328 | F | Y | 0.331454046 | 0.090600532 | 388 | K | N | 0.321769292 | 0.13958088 |
| 303 | W | S | 0.331070804 | 0.245928403 | 504 | D | Y | 0.321517406 | 0.182186572 |
| 421 | W | C | 0.330779828 | 0.216037825 | 260 | R | I | 0.321461619 | 0.146534668 |
| 351 | K | R | 0.330630005 | 0.142537112 | 695 | E | Q | 0.321451268 | 0.199405121 |
| 498 | A | T | 0.33049042 | 0.166213318 | 960 | T | A | 0.321351275 | 0.243570837 |
| 937 | S | T | 0.330380882 | 0.231058955 | 496 | I | F | 0.321275456 | 0.162860461 |
| 592 | OR | DN | 0.329593548 | 0.300041765 | 454 | D | H | 0.321034191 | 0.123925099 |
| 798 | S | F | 0.325769587 | 0.320454472 | 859 | Q | H | 0.321009248 | 0.15665955 |
| 882 | S | G | 0.325732755 | 0.141569252 | 432 | S | I | 0.32093586 | 0.219919612 |
| 759 | R | G | 0.325319087 | 0.080028833 | 120 | E | Q | 0.320905282 | 0.134126668 |
| 576 | D | V | 0.325192282 | 0.239519469 | 359 | E | [stop] | 0.320840565 | 0.172779106 |
| 309 | W | [stop] | 0.325098891 | 0.096106342 | 474 | E | [stop] | 0.320753733 | 0.198938474 |
| 554 | R | I | 0.325075441 | 0.185726803 | 609 | K | R | 0.320654761 | 0.097190768 |
| 483 | Q | H | 0.324598695 | 0.153049426 | 654 | L | P | 0.320340402 | 0.21351518 |
| 979 | E | VSSKDQ | 0.324398559 | 0.118712651 | 344 | W | G | 0.32013599 | 0.133467654 |
| | | (SEQ ID NO: | | | | | | | |
| | | 3823) | | | | | | | |
| 834 | G | C | 0.324348652 | 0.175539945 | 629 | E | D | 0.319764058 | 0.097801219 |
| 719 | S | Y | 0.324298439 | 0.22105488 | 631 | A | D | 0.319695703 | 0.120854121 |
| 842 | K | R | 0.324267597 | 0.102772814 | 124 | S | Y | 0.319588026 | 0.148095027 |
| 97 | S | T | 0.324252325 | 0.240123255 | 244 | Q | R | 0.319581236 | 0.174412151 |
| 172 | H | N | 0.324047776 | 0.168532939 | 338 | A | D | 0.319500211 | 0.171228389 |
| 692 | R | G | 0.324024313 | 0.134914995 | 634 | V | L | 0.3194918 | 0.113193905 |
| 39 | D | V | 0.324012084 | 0.186802864 | 91 | D | N | 0.319468455 | 0.231799127 |
| 776 | T | I | 0.323918216 | 0.153171775 | 740 | D | E | 0.319448668 | 0.093677265 |
| 652 | M | T | 0.323898442 | 0.13705991 | 942 | K | R | 0.319440348 | 0.184998826 |
| 611 | A | V | 0.323836429 | 0.18975125 | 146 | D | Y | 0.319268754 | 0.209601725 |
| 658 | D | G | 0.323834837 | 0.116577804 | 513 | N | K | 0.319264079 | 0.180017602 |
| 158 | C | [stop] | 0.323773158 | 0.093674966 | 366 | Q | H | 0.318971922 | 0.184226775 |
| 887 | G | A | 0.32369757 | 0.19151617 | 477 | R | G | 0.318963003 | 0.179227033 |
| 337 | Q | H | 0.323607141 | 0.165283008 | 947 | K | R | 0.318930494 | 0.25585521 |
| 319 | A | D | 0.323458799 | 0.152084781 | 478 | C | S | 0.318576968 | 0.151506435 |
| 215 | | GGNSCA | 0.323334457 | 0.165215546 | 94 | G | A | 0.315344942 | 0.125574217 |
| | | (SEQ ID NO: | | | | | | | |
| | | 3431) | | | | | | | |
| 351 | K | N | 0.323273003 | 0.138737748 | 509 | S | R | 0.315237336 | 0.198196247 |
| 878 | - | I | 0.323133111 | 0.265099492 | 715 | A | S | 0.314795788 | 0.184022977 |
| 597 | W | C | 0.323039345 | 0.210227048 | 639 | E | G | 0.314490675 | 0.131536259 |
| 85 | W | G | 0.3230112 | 0.140970302 | 485 | W | R | 0.314444162 | 0.077460473 |
| 830 | K | E | 0.322976082 | 0.171606667 | 529 | Y | [stop] | 0.314338149 | 0.096977512 |
| 193 | -- | LD | 0.322600674 | 0.167338288 | 773 | R | M | 0.314128132 | 0.191934874 |
| 350 | V | A | 0.32248331 | 0.252994511 | 227 | A | D | 0.313893012 | 0.086820124 |
| 443 | S | G | 0.318453544 | 0.181417518 | 865 | L | V | 0.313870986 | 0.093939035 |
| 766 | K | E | 0.318255467 | 0.119279294 | 25 | T | S | 0.313828907 | 0.165926738 |
| 557 | T | S | 0.318254881 | 0.136960287 | 206 | H | R | 0.313540953 | 0.153060153 |
| 39 | D | E | 0.318241109 | 0.177504749 | 33 | V | I | 0.313378588 | 0.092743144 |
| 586 | A | S | 0.318046156 | 0.197164692 | 736 | N | S | 0.313292021 | 0.139875641 |
| 270 | A | P | 0.317952258 | 0.133471459 | 613 | G | A | 0.313219371 | 0.139952239 |
| 707 | A | S | 0.317797903 | 0.176472631 | 472 | K | R | 0.313201874 | 0.163543589 |
| 173 | K | N | 0.317699885 | 0.158843579 | 149 | --- | KPH | 0.313073613 | 0.111009375 |
| 676 | P | R | 0.317616441 | 0.273323665 | 966 | R | I | 0.313069041 | 0.220268045 |
| 409 | H | N | 0.31739526 | 0.238962249 | 847 | E | [stop] | 0.312986862 | 0.248850102 |
| 878 | N | D | 0.317341485 | 0.123856244 | 892 | A | V | 0.312917635 | 0.236911004 |
| 967 | K | E | 0.317328223 | 0.198885809 | 322 | L | P | 0.312907638 | 0.167614176 |
| 405 | L | M | 0.317316848 | 0.232382071 | 947 | K | N | 0.312809501 | 0.23804854 |
| 759 | R | T | 0.317284234 | 0.210047842 | 820 | D | Y | 0.312669916 | 0.196444965 |
| 505 | I | M | 0.317274558 | 0.129635964 | 627 | Q | E | 0.312477809 | 0.180929549 |
| 612 | N | D | 0.317252502 | 0.181380961 | 20 | K | T | 0.312450252 | 0.306509245 |
| 862 | V | A | 0.317158438 | 0.090072044 | 914 | C | G | 0.312434698 | 0.246328459 |
| 295 | -N | LS | 0.317076665 | 0.155046903 | 793 | S | G | 0.312385644 | 0.182436917 |
| 165 | R | G | 0.317047785 | 0.17842685 | 411 | E | D | 0.312132984 | 0.213313342 |
| 760 | G | D | 0.316786277 | 0.162885521 | 901 | S | R | 0.311953255 | 0.163461395 |
| 244 | Q | K | 0.316600083 | 0.246636704 | 393 | F | L | 0.311946018 | 0.192991506 |
| 238 | S | Y | 0.316596499 | 0.171458712 | 757 | L | P | 0.311927617 | 0.117197609 |
| 475 | F | L | 0.316549309 | 0.192939087 | 702 | R | G | 0.311688104 | 0.266620819 |
| 829 | K | N | 0.316494901 | 0.154808851 | 589 | K | R | 0.311588343 | 0.136320933 |
| 28 | M | I | 0.31630177 | 0.188404934 | 717 | G | R | 0.311565735 | 0.080863714 |
| 186 | G | A | 0.316262682 | 0.1767869 | 286 | T | S | 0.311321567 | 0.240949263 |
| 679 | R | G | 0.316180477 | 0.112760057 | 150 | P | T | 0.311291496 | 0.13427262 |
| 925 | A | G | 0.315901657 | 0.192750307 | 107 | I | L | 0.307707331 | 0.205313283 |
| 892 | A | P | 0.315901657 | 0.129374073 | 776 | T | A | 0.307705621 | 0.113209696 |
| 642 | E | A | 0.315758891 | 0.205380131 | 306 | L | V | 0.307515106 | 0.116397313 |
| 629 | E | G | 0.315702888 | 0.119743865 | 651 | P | T | 0.307457933 | 0.189846398 |
| 642 | E | G | 0.315673565 | 0.11044042 | 155 | F | Y | 0.307385155 | 0.165676404 |
| 104 | P | R | 0.315607101 | 0.202791238 | 229 | S | T | 0.307373154 | 0.086318269 |
| 807 | K | E | 0.315573228 | 0.117464708 | 517 | I | V | 0.307363772 | 0.108604289 |
| 599 | D | E | 0.315416693 | 0.115740153 | 334 | V | A | 0.306982037 | 0.139604112 |
| 578 | P | A | 0.311263999 | 0.106013626 | 614 | R | K | 0.306921623 | 0.187827913 |
| 41 | R | G | 0.311016733 | 0.286865829 | 824 | V | L | 0.306719384 | 0.210851946 |
| 781 | W | S | 0.310870839 | 0.281958829 | 723 | A | V | 0.306692766 | 0.140247988 |
| 382 | S | I | 0.310857774 | 0.22558917 | 711 | E | G | 0.306675894 | 0.224133351 |
| 723 | A | T | 0.310856537 | 0.118165477 | 499 | E | Q | 0.306671973 | 0.224590082 |
| 451 | A | G | 0.310527551 | 0.159640493 | 104 | P | S | 0.306640385 | 0.162249455 |
| 568 | P | L | 0.310447286 | 0.186724922 | 3 | I | L | 0.306608196 | 0.194776786 |
| 216 | G | S | 0.310362762 | 0.143843218 | 702 | R | K | 0.306541295 | 0.149431609 |
| 216 | G | R | 0.310272111 | 0.119909677 | 954 | K | E | 0.306525004 | 0.187285491 |
| 89 | Q | R | 0.310167676 | 0.139047602 | 842 | --- | KEL | 0.306410776 | 0.206532128 |
| 433 | K | R | 0.310161393 | 0.097615554 | 466 | G | C | 0.30635382 | 0.179163452 |
| 21 | KA | NC | 0.310061242 | 0.098851828 | 979 | ----- | VSSKD (SEQ | 0.306277048 | 0.179502088 |
| | | | | | | | ID NO: 3799) | | |
| | | | | | | | [stop] | | |
| 141 | L | P | 0.309573602 | 0.118441502 | 830 | K | | 0.306086752 | 0.154175951 |
| 425 | D | Y | 0.309531408 | 0.253195982 | 243 | Y | F | 0.306073033 | 0.15669665 |
| 579 | N | D | 0.309484128 | 0.137585893 | 88 | F | L | 0.305867737 | 0.156711191 |
| 825 | L | V | 0.309431153 | 0.160157183 | 149 | K | E | 0.305762803 | 0.092392237 |
| 464 | I | M | 0.309049855 | 0.208541437 | 102 | P | H | 0.305663323 | 0.198476248 |
| 710 | V | L | 0.309047105 | 0.126001585 | 554 | ---- | RFYT (SEQ | 0.305511625 | 0.122801047 |
| | | | | | | | ID NO: 3665) | | |
| 671 | D | H | 0.309035221 | 0.209514286 | 720 | - | R | 0.305347434 | 0.161540535 |
| 735 | R | P | 0.309028904 | 0.132025621 | 128 | A | G | 0.305254739 | 0.159245241 |
| 819 | A | G | 0.308778739 | 0.188847749 | 122 | L | P | 0.305222365 | 0.154910099 |
| 2 | E | G | 0.308512084 | 0.159248809 | 792 | P | S | 0.305214901 | 0.160903917 |
| 109 | Q | H | 0.308384304 | 0.180580793 | 312 | L | P | 0.305192803 | 0.183880511 |
| 66 | L | V | 0.308337109 | 0.160085063 | 299 | Q | [stop] | 0.305119863 | 0.096364942 |
| 93 | V | L | 0.308334538 | 0.186355769 | 668 | A | T | 0.305069729 | 0.135204642 |
| 621 | Y | [stop] | 0.308307714 | 0.182192979 | 962 | Q | R | 0.302114892 | 0.192863031 |
| 0 | M | L | 0.308276685 | 0.236934633 | 656 | G | S | 0.301941181 | 0.160658808 |
| 857 | K | E | 0.308118374 | 0.128063493 | 526 | L | P | 0.301907253 | 0.200130867 |
| 264 | L | I | 0.308089176 | 0.231951197 | 181 | V | L | 0.301627326 | 0.141701986 |
| 646 | S | T | 0.307934288 | 0.163215891 | 602 | S | G | 0.301374384 | 0.168690577 |
| 461 | S | T | 0.307923977 | 0.13026743 | 2 | E | K | 0.301361669 | 0.293245611 |
| 937 | S | N | 0.307902696 | 0.280386833 | 46 | N | S | 0.301357514 | 0.121526311 |
| 774 | Q | L | 0.30782826 | 0.179585187 | 71 | T | S | 0.301285774 | 0.182156883 |
| 427 | K | N | 0.307771318 | 0.212433986 | 887 | G | D | 0.301271887 | 0.117733719 |
| 422 | E | G | 0.307743696 | 0.21393123 | 121 | R | S | 0.301231571 | 0.167844846 |
| 639 | E | Q | 0.304680843 | 0.266883075 | 108 | D | V | 0.301094262 | 0.261979025 |
| 812 | C | [stop] | 0.304671385 | 0.223383408 | 979 | LE[stop]GS- | VSSKDLQA | 0.301043 | 0.222937332 |
| | | | | | | PGI (SEQ ID | (SEQ ID NO: | | |
| | | | | | | NO: 3278) | 3810)[stop] | | |
| 856 | -- | YK | 0.304562199 | 0.117931145 | 73 | Y | [stop] | 0.300976299 | 0.109164204 |
| 959 | ------- | ETWQSFY | 0.304562199 | 0.204359044 | 645 | D | H | 0.300832783 | 0.189820783 |
| | | (SEQ ID NO: | | | | | | | |
| | | 3403) | | | | | | | |
| 640 | R | [stop] | 0.304365031 | 0.131009317 | 972 | --- | VWK | 0.300386808 | 0.146545616 |
| 968 | KL | S[stop] | 0.304328899 | 0.221090558 | 127 | F | S | 0.300342022 | 0.146847301 |
| 24 | K | N | 0.304215048 | 0.239991354 | 571 | V | A | 0.300337937 | 0.156010497 |
| 858 | R | T | 0.304052714 | 0.1448623 | 386 | D | N | 0.300273532 | 0.259491112 |
| 530 | L | M | 0.303970715 | 0.250168829 | 381 | L | M | 0.300116697 | 0.157006178 |
| 269 | S | R | 0.303928294 | 0.209763505 | 493 | P | A | 0.299995588 | 0.227049942 |
| 251 | Q | E | 0.303459913 | 0.190095434 | 199 | H | R | 0.299830107 | 0.074234175 |
| 340 | E | Q | 0.30343193 | 0.10804688 | 642 | E | [stop] | 0.299768631 | 0.20842894 |
| 623 | - | R | 0.303430789 | 0.233394445 | 352 | K | [stop] | 0.299555207 | 0.106916877 |
| 880 | D | Y | 0.30324465 | 0.244720194 | 314 | I | V | 0.299339024 | 0.237860572 |
| 223 | P | A | 0.303031527 | 0.177373299 | 696 | S | T | 0.299269551 | 0.19370537 |
| 899 | R | T | 0.302967154 | 0.112177355 | 554 | R | G | 0.299260223 | 0.263070996 |
| 60 | N | D | 0.30295183 | 0.177064719 | 413 | W | S | 0.298889603 | 0.120871006 |
| 966 | R | S | 0.302926375 | 0.099801177 | 973 | W | [stop] | 0.298886432 | 0.173734887 |
| 687 | P | A | 0.302859855 | 0.188291569 | 1 | Q | [stop] | 0.298848883 | 0.253324527 |
| 821 | Y | C | 0.302780706 | 0.154234626 | 59 | S | G | 0.298416382 | 0.178538741 |
| 628 | D | Y | 0.302709978 | 0.176578494 | 717 | G | [stop] | 0.298317755 | 0.217662606 |
| 952 | -------- | TDKRAFVE | 0.302629733 | 0.089246659 | 348 | C | S | 0.298274049 | 0.13599769 |
| | | (SEQ ID NO: | | | | | | | |
| | | 3741) | | | | | | | |
| 540 | L | V | 0.302623885 | 0.094608809 | 707 | A | G | 0.298173789 | 0.189062395 |
| 855 | R | T | 0.302608606 | 0.19469877 | 345 | D | Y | 0.295298688 | 0.153403354 |
| 59 | S | I | 0.302606901 | 0.165051866 | 469 | E | G | 0.295269456 | 0.193145904 |
| 272 | G | D | 0.302541592 | 0.185286895 | 495 | A | T | 0.295248074 | 0.179130836 |
| 284 | P | H | 0.302498547 | 0.213421981 | 929 | A | G | 0.295233981 | 0.250007265 |
| 342 | -- | TS | 0.302413033 | 0.240972915 | 435 | I | T | 0.2952095 | 0.10707736 |
| 43 | R | W | 0.302283296 | 0.149981215 | 586 | A | T | 0.295123473 | 0.125804414 |
| 760 | G | A | 0.302207311 | 0.130376601 | 627 | Q | R | 0.295089748 | 0.147312376 |
| 766 | K | N | 0.302181165 | 0.136382512 | 17 | S | I | 0.295022842 | 0.203345294 |
| 478 | CE | AQ | 0.298056287 | 0.28697996 | 96 | M | V | 0.29492941 | 0.118289949 |
| 915 | G | A | 0.298020743 | 0.21282862 | 83 | V | M | 0.294841632 | 0.151911965 |
| 969 | L | M | 0.297993119 | 0.288243926 | 721 | K | [stop] | 0.294783263 | 0.121804362 |
| 953 | D | V | 0.297929214 | 0.145206254 | 550 | F | S | 0.294772324 | 0.160417343 |
| 485 | W | G | 0.297911414 | 0.242181721 | 538 | G | A | 0.29474804 | 0.174345187 |
| 676 | P | A | 0.297863971 | 0.089640148 | 462 | F | L | 0.294742725 | 0.14185505 |
| 4 | K | T | 0.297828559 | 0.161108285 | 822 | D | H | 0.294658575 | 0.162957386 |
| 631 | A | G | 0.297777083 | 0.103836414 | 213 | QI | PV | 0.294575907 | 0.193654425 |
| 250 | H | P | 0.29766948 | 0.081415922 | 658 | D | N | 0.294502464 | 0.107952026 |
| 11 | - | R | 0.29755173 | 0.242218951 | 309 | W | S | 0.294338009 | 0.284836107 |
| 274 | A | T | 0.297540582 | 0.172279995 | 835 | W | C | 0.294317109 | 0.120763755 |
| 918 | T | K | 0.297381988 | 0.249593921 | 607 | S | Y | 0.294194742 | 0.192145848 |
| 43 | R | L | 0.297375059 | 0.247052829 | 853 | Y | [stop] | 0.294188525 | 0.116100881 |
| 51 | P | A | 0.29736536 | 0.241677851 | 895 | L | M | 0.294152124 | 0.189733578 |
| 64 | A | T | 0.297190007 | 0.136022098 | 298 | AQ | DR | 0.294067945 | 0.080730567 |
| 617 | E | Q | 0.297156994 | 0.256789508 | 221 | S | T | 0.293988985 | 0.161830985 |
| 468 | | K | 0.297121715 | 0.218726347 | 854 | ----- | NRYKRQ | 0.29389502 | 0.164228467 |
| | | | | | | | (SEQ ID NO: | | |
| | | | | | | | 3597) | | |
| 705 | Q | [stop] | 0.297097391 | 0.129530594 | 184 | --- | SLG | 0.29389502 | 0.133943716 |
| 538 | G | D | 0.297030166 | 0.143641253 | 24 | K | E | 0.293893146 | 0.087429384 |
| 697 | Y | [stop] | 0.29694611 | 0.165401562 | 903 | R | T | 0.293855808 | 0.156130706 |
| 30 | T | N | 0.296922856 | 0.20113666 | 649 | I | M | 0.293844709 | 0.213121389 |
| 374 | Q | E | 0.296916876 | 0.294201034 | 646 | S | N | 0.293718938 | 0.053702828 |
| 429 | E | G | 0.296692622 | 0.12956891 | 751 | M | T | 0.293692865 | 0.188828745 |
| 617 | E | G | 0.296673186 | 0.100617287 | 138 | V | A | 0.293692865 | 0.172441917 |
| 174 | P | L | 0.296325925 | 0.125090192 | 421 | W | R | 0.293643119 | 0.202965718 |
| 476 | C | W | 0.296243077 | 0.108583652 | 891 | E | D | 0.290888227 | 0.199229012 |
| 536 | K | [stop] | 0.296174047 | 0.204485045 | 663 | I | T | 0.290884576 | 0.159824412 |
| 340 | E | [stop] | 0.296106359 | 0.228363644 | 86 | E | G | 0.290735509 | 0.164271816 |
| 263 | N | S | 0.295761788 | 0.153417105 | 950 | ------- | GNTDKRA | 0.290646329 | 0.08439848 |
| | | | | | | | (SEQ ID NO: | | |
| | | | | | | | 3447) | | |
| 292 | A | D | 0.295588873 | 0.132003236 | 910 | V | A | 0.290614659 | 0.192165123 |
| 524 | K | E | 0.295588726 | 0.123024834 | 130 | S | R | 0.290579337 | 0.126556505 |
| 252 | K | E | 0.295509892 | 0.130412924 | 286 | T | A | 0.290569747 | 0.161258253 |
| 360 | D | H | 0.295426779 | 0.169820671 | 412 | D | Y | 0.290563856 | 0.192946257 |
| 771 | A | T | 0.295409018 | 0.21146028 | 390 | G | C | 0.290531408 | 0.226107283 |
| 960 | T | S | 0.295303172 | 0.200733126 | 96 | M | T | 0.290483084 | 0.117441458 |
| 885 | T | A | 0.293639992 | 0.136222429 | 796 | Y | F | 0.290480726 | 0.145066767 |
| 372 | K | N | 0.293601801 | 0.159631501 | 617 | E | [stop] | 0.290459043 | 0.254049857 |
| 899 | R | W | 0.293409271 | 0.197663789 | 520 | K | Q | 0.290432231 | 0.149193863 |
| 323 | Q | R | 0.293396269 | 0.187618952 | 238 | S | C | 0.29036146 | 0.125809391 |
| 787 | A | V | 0.293181255 | 0.111256021 | 510 | K | N | 0.290307315 | 0.121616244 |
| 97 | S | G | 0.29311892 | 0.120983434 | 751 | M | I | 0.290086322 | 0.117481113 |
| 523 | V | A | 0.293107836 | 0.144403198 | 764 | Q | E | 0.290043861 | 0.213865459 |
| 606 | GS | -A | 0.293095145 | 0.176419666 | 239 | F | L | 0.290032145 | 0.120563078 |
| 647 | S | G | 0.293070849 | 0.180316262 | 750 | A | S | 0.290021488 | 0.169783417 |
| 401 | L | M | 0.293059235 | 0.238931791 | 509 | S | N | 0.290010303 | 0.173158694 |
| 706 | A | T | 0.293004089 | 0.157196701 | 791 | L | V | 0.28993006 | 0.240441646 |
| 167 | I | M | 0.292976512 | 0.174804994 | 976 | A | P | 0.289917569 | 0.129909297 |
| 239 | F | Y | 0.292846447 | 0.244049066 | 970 | K | E | 0.289792346 | 0.088055606 |
| 532 | I | M | 0.292790974 | 0.132047771 | 370 | G | S | 0.289754414 | 0.116500268 |
| 362 | K | N | 0.292779584 | 0.196868197 | 229 | S | I | 0.289718863 | 0.192569781 |
| 531 | I | F | 0.292690193 | 0.245999103 | 126 | G | S | 0.289695476 | 0.136718855 |
| 551 | E | D | 0.292676692 | 0.177028816 | 39 | D | H | 0.28966543 | 0.205820796 |
| 366 | Q | R | 0.292637285 | 0.233099785 | 541 | R | W | 0.289647451 | 0.149474595 |
| 45 | E | K | 0.292602703 | 0.135241306 | 963 | S | R | 0.289642486 | 0.119359764 |
| 170 | S | P | 0.292487757 | 0.117055288 | 614 | R | G | 0.289631701 | 0.096593744 |
| 522 | -------- | GVKKLNLY | 0.292477218 | 0.205588046 | 903 | R | K | 0.289598509 | 0.276955136 |
| | | (SEQ ID NO: | | | | | | | |
| | | 3455) | | | | | | | |
| 184 | S | T | 0.292461578 | 0.171099938 | 700 | K | E | 0.289582689 | 0.146563937 |
| 256 | K | R | 0.292459664 | 0.134546625 | 176 | A | T | 0.289565984 | 0.071489526 |
| 898 | K | R | 0.292371281 | 0.233917307 | 862 | V | L | 0.28755723 | 0.122530143 |
| 687 | ------ | PTHILR (SEQ | 0.292237604 | 0.252992689 | 376 | A | D | 0.287488687 | 0.149852687 |
| | | ID NO: 3627) | | | | | | | |
| 499 | E | [stop] | 0.292180944 | 0.205912614 | 717 | G | A | 0.287475979 | 0.138371481 |
| 439 | E | [stop] | 0.291789527 | 0.178224776 | 871 | R | G | 0.287423469 | 0.12544588 |
| 286 | T | I | 0.291597253 | 0.134630039 | 779 | E | [stop] | 0.287388451 | 0.214465092 |
| 326 | K | R | 0.291167908 | 0.130858044 | 659 | R | Q | 0.287382153 | 0.188389105 |
| 309 | W | C | 0.291117426 | 0.126634127 | 688 | T | S | 0.2872606 | 0.18090055 |
| 141 | L | V | 0.291053469 | 0.125358393 | 450 | A | G | 0.287222025 | 0.226851871 |
| 599 | D | H | 0.290990101 | 0.194898673 | 608 | L | P | 0.287206606 | 0.153956956 |
| 714 | R | G | 0.289551118 | 0.131217053 | 74 | T | A | 0.28708898 | 0.151009591 |
| 849 | Q | E | 0.289450204 | 0.14256548 | 101 | Q | H | 0.287075864 | 0.127870371 |
| 861 | V | L | 0.289424991 | 0.184715842 | 168 | L | M | 0.287051161 | 0.164606192 |
| 227 | A | S | 0.289407395 | 0.147147965 | 522 | G | A | 0.286889556 | 0.191392288 |
| 337 | Q | E | 0.289400311 | 0.154536453 | 158 | -- | CN | 0.286856801 | 0.104191954 |
| 282 | P | Q | 0.289371748 | 0.241776764 | 822 | D | Y | 0.286792384 | 0.216414998 |
| 147 | ----- | KGKPH (SEQ | 0.289327222 | 0.167067239 | 31 | LL | PV | 0.286704233 | 0.167404084 |
| | | ID NO: 3494) | | | | | | | |
| 215 | -------- | GGNSCASG | 0.28926976 | 0.113347286 | 753 | ------ | IFENLS (SEQ | 0.286664247 | 0.204891377 |
| | | (SEQ ID NO: | | | | | ID NO: 3474) | | |
| | | 3432) | | | | | | | |
| 615 | - | Q | 0.288918789 | 0.138819471 | 894 | ---- | SLLK (SEQ | 0.286588033 | 0.088926565 |
| | | | | | | | ID NO: 3719) | | |
| 148 | ------- | GKPHTNY | 0.288918789 | 0.145077971 | 443 | S | R | 0.286575868 | 0.16053834 |
| | | (SEQ ID NO: | | | | | | | |
| | | 3438) | | | | | | | |
| 70 | L | V | 0.288897546 | 0.141249384 | 813 | G | S | 0.286517663 | 0.166687094 |
| 131 | Q | H | 0.28889109 | 0.089984222 | 545 | I | T | 0.28643634 | 0.175437623 |
| 417 | Y | [stop] | 0.288830461 | 0.139069155 | 43 | R | G | 0.286322337 | 0.211707784 |
| 917 | E | Q | 0.288684907 | 0.209421131 | 671 | D | G | 0.28629192 | 0.163952723 |
| 681 | K | R | 0.288657171 | 0.188212382 | 501 | S | T | 0.286282753 | 0.120251174 |
| 824 | --- | VLE | 0.288568311 | 0.142383803 | 729 | L | M | 0.286200559 | 0.141100837 |
| 757 | L | M | 0.288547614 | 0.138199941 | 264 | L | F | 0.28603772 | 0.148836446 |
| 683 | S | P | 0.288449161 | 0.100064584 | 613 | G | S | 0.285821749 | 0.213295055 |
| 879 | N | D | 0.288359669 | 0.112916417 | 806 | S | P | 0.285754508 | 0.139734573 |
| 87 | EF | AV | 0.28833835 | 0.157423397 | 251 | Q | R | 0.285704309 | 0.129794167 |
| 623 | R | M | 0.288312668 | 0.180378091 | 503 | L | P | 0.285623626 | 0.150765257 |
| 360 | D | G | 0.288240177 | 0.1450193 | 544 | K | N | 0.285528499 | 0.105740594 |
| 469 | E | D | 0.288213424 | 0.169330277 | 685 | G | S | 0.285482686 | 0.116956671 |
| 488 | D | H | 0.288056714 | 0.224399768 | 66 | L | P | 0.285241304 | 0.178235911 |
| 832 | A | D | 0.28797086 | 0.133987122 | 713 | R | [stop] | 0.281751627 | 0.150509506 |
| 331 | F | L | 0.287898632 | 0.125465761 | 759 | R | I | 0.281715415 | 0.207490665 |
| 880 | D | N | 0.287796432 | 0.265861692 | 103 | A | D | 0.281654023 | 0.156258821 |
| 813 | G | V | 0.28764847 | 0.18793522 | 352 | K | R | 0.281644749 | 0.090972271 |
| 125 | S | R | 0.287612867 | 0.078156909 | 23 | G | D | 0.281613067 | 0.110087313 |
| 315 | G | V | 0.287582891 | 0.216366011 | 490 | R | I | 0.28158749 | 0.189684 |
| 348 | C | [stop] | 0.285167016 | 0.232120541 | 534 | Y | C | 0.281578683 | 0.19797794 |
| 615 | V | L | 0.285139566 | 0.138644746 | 728 | N | K | 0.281567938 | 0.122533743 |
| 34 | R | K | 0.285068253 | 0.155629412 | 218 | S | G | 0.28156304 | 0.0827746 |
| 606 | G | D | 0.284708065 | 0.131937418 | 131 | Q | K | 0.28143462 | 0.261996702 |
| 564 | G | R | 0.284584869 | 0.153328649 | 117 | D | Y | 0.281261616 | 0.150312544 |
| 767 | R | G | 0.284520477 | 0.167110905 | 809 | C | S | 0.281246687 | 0.119977311 |
| 459 | K | N | 0.284319069 | 0.144116629 | 899 | R | S | 0.281103794 | 0.115069396 |
| 100 | A | G | 0.284064196 | 0.232698011 | 192 | A | P | 0.281083951 | 0.125030936 |
| 182 | T | S | 0.284017418 | 0.165066704 | 913 | N | S | 0.280977138 | 0.259159821 |
| 552 | A | P | 0.28399207 | 0.192922882 | 232 | C | S | 0.28083211 | 0.170644437 |
| 874 | E | [stop] | 0.283924403 | 0.212096559 | 928 | I | L | 0.280808974 | 0.249623753 |
| 656 | G | V | 0.283837412 | 0.096364514 | 495 | A | G | 0.280579997 | 0.166279564 |
| 527 | N | D | 0.283828964 | 0.095606466 | 917 | ----- | ETHAA (SEQ | 0.280544768 | 0.259917773 |
| | | | | | | | ID NO: 3399) | | |
| 560 | N | D | 0.283827293 | 0.131100485 | 85 | W- | LS | 0.280472053 | 0.101385815 |
| 518 | W | [stop] | 0.283768829 | 0.144873432 | 344 | W | [stop] | 0.280246002 | 0.139860723 |
| 900 | F | Y | 0.283754684 | 0.18210141 | 493 | P | H | 0.280219202 | 0.225933372 |
| 485 | W | C | 0.283722783 | 0.101623525 | 189 | G | A | 0.28010846 | 0.181165246 |
| 528 | L | M | 0.283582823 | 0.241404553 | 565 | E | G | 0.28010846 | 0.126376781 |
| 463 | V | L | 0.283409253 | 0.174572622 | 944 | Q | R | 0.279992746 | 0.221800854 |
| 938 | Q | R | 0.283399277 | 0.159588016 | 674 | G | A | 0.27982066 | 0.112736684 |
| 809 | C | R | 0.2832933 | 0.140866937 | 45 | E | V | 0.279758496 | 0.126165976 |
| 765 | G | V | 0.283226034 | 0.181883423 | 281 | P | A | 0.27973122 | 0.169207983 |
| 253 | V | E | 0.283192966 | 0.158310209 | 828 | L | P | 0.279653349 | 0.165044194 |
| 745 | A | D | 0.283094632 | 0.139036808 | 460 | A | D | 0.27950426 | 0.185233285 |
| 739 | R | S | 0.283000418 | 0.086394522 | 539 | K | R | 0.279423784 | 0.231876099 |
| 262 | A | D | 0.282981572 | 0.21883829 | 62 | S | G | 0.279325036 | 0.105769252 |
| 75 | E | D | 0.282861668 | 0.096240394 | 883 | S | T | 0.278909433 | 0.17133128 |
| 122 | L | V | 0.28282995 | 0.142431105 | 166 | --- | LIL | 0.27890183 | 0.114735325 |
| 427 | K | R | 0.282689541 | 0.126741896 | 553 | N | K | 0.276534729 | 0.129122139 |
| 472 | K | E | 0.282354225 | 0.243592384 | 500 | N | K | 0.276479484 | 0.075342066 |
| 69 | L | V | 0.282311609 | 0.233097353 | 796 | Y | [stop] | 0.276459628 | 0.151040972 |
| 128 | A | D | 0.282136746 | 0.144684711 | 313 | K | E | 0.276424062 | 0.141250225 |
| 240 | L | P | 0.282112821 | 0.187484636 | 184 | S | R | 0.276360484 | 0.093462218 |
| 840 | N | D | 0.28205862 | 0.169019904 | 770 | M | V | 0.276349013 | 0.177344184 |
| 496 | I | L | 0.281766947 | 0.156440465 | 30 | T | S | 0.27626759 | 0.074607362 |
| 445 | D | N | 0.27879438 | 0.120139275 | 887 | G | C | 0.276203171 | 0.205245818 |
| 121 | R | G | 0.278752599 | 0.152495589 | 885 | T | S | 0.276162821 | 0.125136939 |
| 66 | LN | PV | 0.278503247 | 0.058556198 | 372 | K | E | 0.2761455 | 0.186164615 |
| 603 | ------- | LETGSLK | 0.278503247 | 0.20379117 | 161 | S | F | 0.276099268 | 0.101256778 |
| | | (SEQ ID NO: | | | | | | | |
| | | 3545) | | | | | | | |
| 225 | G | [stop] | 0.278489806 | 0.182580993 | 280 | LP | PV | 0.2760948 | 0.15312325 |
| 175 | --- | EAN | 0.278488851 | 0.117512649 | 118 | G | A | 0.276069076 | 0.158472607 |
| 274 | A | S | 0.278435433 | 0.213434648 | 945 | T | S | 0.275967844 | 0.217091948 |
| 870 | D | G | 0.278347965 | 0.136371883 | 597 | W | S | 0.275959763 | 0.205648781 |
| 683 | S | T | 0.278234202 | 0.119170388 | 700 | K | [stop] | 0.275943939 | 0.231744011 |
| 792 | P | H | 0.277909356 | 0.196357382 | 654 | L | M | 0.275895098 | 0.222206287 |
| 18 | N | R | 0.277904726 | 0.144376969 | 34 | R | I | 0.275728667 | 0.262529033 |
| 484 | K | R | 0.277812806 | 0.156918996 | 650 | K | N | 0.275727906 | 0.092682765 |
| 51 | P | H | 0.27780081 | 0.207949147 | 347 | V | D | 0.275634849 | 0.162043607 |
| 549 | A | D | 0.277618034 | 0.184792104 | 701 | Q | E | 0.275445666 | 0.129639485 |
| 285 | H | Q | 0.277595201 | 0.164383067 | 221 | S | P | 0.275424064 | 0.253543179 |
| 772 | E | [stop] | 0.277569205 | 0.252009775 | 902 | H | Y | 0.275413846 | 0.238626124 |
| 233 | M | T | 0.277522281 | 0.101460422 | 408 | K | N | 0.275278915 | 0.187758493 |
| 677 | ------- | LSRFKDS | 0.277439144 | 0.176461932 | 410 | G | R | 0.275207307 | 0.148329245 |
| | | (SEQ ID NO: | | | | | | | |
| | | 3578) | | | | | | | |
| 444 | E | D | 0.277438575 | 0.185715982 | 202 | R | T | 0.27519939 | 0.225294793 |
| 287 | K | R | 0.277424076 | 0.122002352 | 190 | Q | H | 0.275101911 | 0.155497318 |
| 86 | E | Q | 0.277422525 | 0.267475322 | 296 | V | A | 0.274868513 | 0.216028266 |
| 650 | K | R | 0.277338051 | 0.1661601 | 176 | A | V | 0.274754076 | 0.101747221 |
| 119 | N | K | 0.2772012 | 0.097660237 | 16 | D | V | 0.274707044 | 0.080710216 |
| 419 | E | D | 0.27717758 | 0.091079949 | 338 | A | G | 0.274649181 | 0.21549192 |
| 849 | Q | H | 0.277146577 | 0.10057266 | 908 | K | [stop] | 0.274631009 | 0.235774306 |
| 745 | A | P | 0.277094424 | 0.180486538 | 745 | A | T | 0.274596368 | 0.139876086 |
| 895 | L | V | 0.277059576 | 0.147621158 | 582 | I | T | 0.274539152 | 0.136455089 |
| 200 | V | R | 0.276947529 | 0.109871945 | 73 | Y | H | 0.274522926 | 0.183155681 |
| 491 | G | A | 0.276923451 | 0,236639042 | 525 | ------ | KLNLYL | 0.272179534 | 0.127115618 |
| | | | | | | | (SEQ ID NO: | | |
| | | | | | | | 3512) | | |
| 437 | L | P | 0.276817656 | 0.127643327 | 178 | D | H | 0.27217863 | 0.114858223 |
| 794 | K | E | 0.276808052 | 0.108760175 | 186 | G | S | 0.272004663 | 0.206440397 |
| 609 | K | E | 0.274518342 | 0.096584602 | 797 | LS | PV | 0.271846299 | 0.116235959 |
| 148 | ----- | GKPHT (SEQ | 0.274483854 | 0.138944547 | 434 | H | L | 0.271775834 | 0.108387354 |
| | | ID NO: 3436) | | | | | | | |
| 269 | S | I | 0.274483065 | 0.167999753 | 124 | S | C | 0.271634239 | 0.201362524 |
| 600 | L | P | 0.274446407 | 0.156944314 | 687 | ---- | PTHI (SEQ ID | 0.271046382 | 0.217907583 |
| | | | | | | | NO: 3625) | | |
| 609 | K | N | 0.274296988 | 0.098675974 | 626 | R | I | 0.271037385 | 0.191496316 |
| 548 | E | G | 0.274291628 | 0.174184065 | 717 | G | V | 0.271024109 | 0.162847575 |
| 282 | P | R | 0.274223113 | 0.269615449 | 534 | Y | [stop] | 0.270681224 | 0.104188898 |
| 743 | Y | N | 0.274041951 | 0.169744437 | 150 | P | H | 0.270599643 | 0.192362809 |
| 273 | LA | PV | 0.273953381 | 0.083004597 | 552 | A | S | 0.270597368 | 0.181876059 |
| 241 | ----- | TKYQD (SEQ | 0.273953381 | 0.041697608 | 150 | P | S | 0.270581156 | 0.14794261 |
| | | ID NO: 3752) | | | | | | | |
| 752 | LI | PV | 0.273953381 | 0.179521275 | 270 | A | S | 0.270550408 | 0.145246028 |
| 500 | ----- | NSILD (SEQ | 0.273953381 | 0.096079618 | 563 | S | Y | 0.270533409 | 0.17681632 |
| | | ID NO: 3598) | | | | | | | |
| 88 | FQ | DR | 0.273953381 | 0.132934109 | 664 | --- | PAV | 0.270462826 | 0.090794222 |
| 548 | E | K | 0.273785339 | 0.140999456 | 97 | S | I | 0.270410385 | 0.155670382 |
| 758 | S | T | 0.273170088 | 0.17814745 | 64 | A | D | 0.270367942 | 0.13574281 |
| 884 | W | S | 0.27315778 | 0.127540825 | 143 | Q | E | 0.27021122 | 0.220203083 |
| 258 | E | D | 0.273147573 | 0.172394328 | 686 | N | I | 0.270089028 | 0.228432562 |
| 720 | R | M | 0.272984313 | 0.209562405 | 544 | K | [stop] | 0.270051777 | 0.124983342 |
| 217 | N | H | 0.272871217 | 0.212149421 | 537 | G | A | 0.270050779 | 0.18424231 |
| 0 | M | R | 0.272866831 | 0.105028991 | 902 | H | L | 0.269853978 | 0.238618549 |
| 376 | A | G | 0.27284261 | 0.107816996 | 361 | G | A | 0.269774718 | 0.191146018 |
| 221 | S | C | 0.272816553 | 0.204562414 | 963 | S | C | 0.269617744 | 0.20243244 |
| 691 | LR | PV | 0.272779276 | 0.168092844 | 965 | Y | H | 0.26944455 | 0.246260675 |
| 796 | YL | DR | 0.272779276 | 0.144849416 | 66 | --- | LNK | 0.269318761 | 0.181427468 |
| 439 | ---- | EERR (SEQ | 0.272779276 | 0.117493254 | 959 | ----- | ETWQS (SEQ | 0.269318761 | 0.133778085 |
| | | ID NO: 3381) | | | | | ID NO: 3402) | | |
| 383 | S | N | 0.272651878 | 0.203030872 | 509 | ----- | SKQYN (SEQ | 0.269239232 | 0.199612231 |
| | | | | | | | ID NO: 3712) | | |
| 603 | L | M | 0.272615876 | 0.2046327 | 32 | L | I | 0.269033673 | 0.109933858 |
| 183 | Y | H | 0.27230417 | 0.167987777 | 913 | N | I | 0.265873279 | 0.228181021 |
| 858 | R | K | 0.272264159 | 0.162833579 | 775 | Y | S | 0.265844485 | 0.132207982 |
| 209 | K | N | 0.269020729 | 0.109971766 | 678 | S | R | 0.265770435 | 0.147977027 |
| 48 | R | [stop] | 0.268939151 | 0.082435645 | 602 | S | R | 0.265750704 | 0.118408744 |
| 466 | - | T | 0.268825688 | 0.095723888 | 121 | R | T | 0.265718915 | 0.126781949 |
| 45 | E | Q | 0.268733142 | 0.139266278 | 818 | S | R | 0.265623217 | 0.145609734 |
| 843 | E | Q | 0.268599201 | 0.195661988 | 798 | S | C | 0.265584497 | 0.073889024 |
| 643 | V | L | 0.268577714 | 0.156052892 | 864 | ------ | DLSVEL | 0.265506357 | 0.19885122 |
| | | | | | | | (SEQ ID NO: | | |
| | | | | | | | 3365) | | |
| 285 | H | R | 0.268299231 | 0.21489701 | 373 | R | G | 0.265364174 | 0.162678423 |
| 317 | D | G | 0.268047511 | 0.116283826 | 803 | Q | E | 0.265269725 | 0.202509841 |
| 195 | F | L | 0.268045884 | 0.108480308 | 628 | D | E | 0.265261641 | 0.142156395 |
| 590 | R | K | 0.267781681 | 0.208536761 | 194 | D | N | 0.265249363 | 0.155857424 |
| 180 | L | V | 0.267694655 | 0.240305187 | 336 | R | I | 0.2651284 | 0.181377392 |
| 21 | KA | TV | 0.267470584 | 0.147038119 | 602 | S | I | 0.265065039 | 0.204267576 |
| 210 | P | H | 0.267434518 | 0.190772597 | 34 | R | S | 0.265026085 | 0.223416007 |
| 612 | N | S | 0.267419306 | 0.129882451 | 775 | Y | N | 0.264899495 | 0.150356822 |
| 440 | E | G | 0.267419306 | 0.166870392 | 647 | ---- | SNIK (SEQ ID | 0.264896362 | 0.152108713 |
| | | | | | | | NO: 3725) | | |
| 651 | P | L | 0.267350724 | 0.179171164 | 369 | A | G | 0.264866639 | 0.127314344 |
| 686 | ------- | NPTHILR | 0.267281547 | 0.145940038 | 407 | KKHGEDWG | RSTARTGA | 0.26465494 | 0.11425501 |
| | | (SEQ ID NO: | | | | (SEQ ID NO: | (SEQ ID NO: | | |
| | | 3595) | | | | 3269) | 3688) | | |
| 56 | Q | E | 0.267209421 | 0.156465006 | 117 | D | H | 0.264598341 | 0.092643909 |
| 656 | G | D | 0.267197717 | 0.143131022 | 149 | K | R | 0.26429667 | 0.254633892 |
| 591 | Q | E | 0.267046259 | 0.172628923 | 624 | R | S | 0.264277774 | 0.09593797 |
| 771 | A | P | 0.266971248 | 0.20146384 | 526 | L | M | 0.26419728 | 0.176624184 |
| 667 | I | N | 0.266893998 | 0.140849994 | 671 | D | N | 0.264084519 | 0.212711081 |
| 333 | L | P | 0.26683779 | 0.202160591 | 572 | N | K | 0.264075863 | 0.218490453 |
| 168 | L | V | 0.266833554 | 0.09646076 | 949 | T | S | 0.263657544 | 0.110498861 |
| 43 | R | P | 0.266528412 | 0.166392391 | 20 | KKA | T-V | 0.263583848 | 0.126615658 |
| 76 | M | T | 0.26642278 | 0.06437874 | 56 | Q | R | 0.263561421 | 0.151855491 |
| 85 | WE | CC | 0.266335966 | 0.095081027 | 492 | K | N | 0.263524564 | 0.121563708 |
| 784 | A | D | 0.266225364 | 0.186318048 | 315 | G | D | 0.26350398 | 0.250984577 |
| 179 | E | G | 0.266200643 | 0.159572948 | 440 | E | [stop] | 0.260572941 | 0.226197983 |
| 282 | P | T | 0.266142294 | 0.234821238 | 245 | D | Y | 0.260411841 | 0.171518027 |
| 505 | I | V | 0.266033676 | 0.153318009 | 838 | T | A | 0.260310871 | 0.127668195 |
| 884 | W | C | 0.265892315 | 0.146379991 | 510 | K | E | 0.260303511 | 0.170827119 |
| 705 | Q | L | 0.265873279 | 0.218762249 | 885 | T | I | 0.260229119 | 0.18213929 |
| 625 | T | S | 0.263431268 | 0.11997699 | 606 | G | C | 0.260187776 | 0.249968408 |
| 657 | I | S | 0.26332391 | 0.140695845 | 298 | A | P | 0.260175418 | 0.137767012 |
| 688 | T | R | 0.26332192 | 0.129910161 | 31 | L | R | 0.260094537 | 0.205569477 |
| 835 | W | R | 0.263224631 | 0.136063076 | 19 | T | I | 0.259989986 | 0.207028692 |
| 903 | R | S | 0.263145681 | 0.157044964 | 886 | K | R | 0.259901164 | 0.087667222 |
| 876 | S | T | 0.262876961 | 0.112192073 | 817 | T | S | 0.259831477 | 0.054519088 |
| 468 | K | R | 0.262863102 | 0.120169191 | 901 | S | T | 0.259815097 | 0.082797155 |
| 590 | --- | RQG | 0.26279648 | 0.125412364 | 343 | W | S | 0.259761267 | 0.144643456 |
| 912 | L | R | 0.262679132 | 0.194562045 | 25 | T | R | 0.259617038 | 0.188030957 |
| 222 | G | R | 0.262575495 | 0.121179798 | 238 | S | P | 0.259597922 | 0.12796144 |
| 379 | P | A | 0.262556362 | 0.200217288 | 343 | W | R | 0.259570669 | 0.092335686 |
| 7 | N | Y | 0.262545332 | 0.249153444 | 317 | D | Y | 0.259540606 | 0.174340169 |
| 514 | C | R | 0.262528328 | 0.153764358 | 347 | ------ | VCNVICK | 0.259425173 | 0.186479916 |
| | | | | | | | (SEQ ID NO: | | |
| | | | | | | | 3770) | | |
| 964 | -- | FY | 0.262491519 | 0.18918584 | 606 | G | S | 0.259379927 | 0.201078104 |
| 951 | N | I | 0.262433241 | 0.181173796 | 879 | N | S | 0.259300679 | 0.19356618 |
| 738 | A | S | 0.262344275 | 0.213159289 | 784 | A | S | 0.259182688 | 0.192685039 |
| 109 | Q | K | 0.262161279 | 0.235829587 | 48 | R | I | 0.259088713 | 0.132594855 |
| 371 | Y | C | 0.262089785 | 0.121531872 | 112 | L | M | 0.25908476 | 0.122948809 |
| 62 | S | I | 0.262062515 | 0.217469036 | 181 | V | A | 0.259030426 | 0.153412207 |
| 967 | K | N | 0.261999761 | 0.11991933 | 567 | V | M | 0.258972858 | 0.206147057 |
| 395 | R | T | 0.261975414 | 0.202071604 | 787 | A | P | 0.258909575 | 0.199316536 |
| 546 | K | E | 0.261933935 | 0.196957538 | 741 | --- | LLY | 0.258835623 | 0.170116186 |
| 473 | D | H | 0.26183541 | 0.210514432 | 280 | -- | LP | 0.258711013 | 0.142341042 |
| 422 | | ERIDKKV | 0.261766763 | 0.175889641 | 639 | ------- | ERREVLD | 0.258711013 | 0.096645952 |
| | | (SEQ ID NO: | | | | | (SEQ ID NO: | | |
| | | 3393) | | | | | 3395) | | |
| 661 | E | D | 0.261685468 | 0.21738252 | 11 | RR | AS | 0.258711013 | 0.198257452 |
| 807 | K | N | 0.261631077 | 0.137745855 | 660 | G | V | 0.258707306 | 0.163939116 |
| 495 | A | P | 0.261336035 | 0.145111761 | 519 | ----- | QKDGVK | 0.255711118 | 0.090066635 |
| | | | | | | | (SEQ ID NO: | | |
| | | | | | | | 3641) | | |
| 474 | E | V | 0.261129255 | 0.1424745 | 977 | V | E | 0.255573788 | 0.223531947 |
| 100 | A | V | 0.261042682 | 0.097040591 | 448 | S | P | 0.255534334 | 0.216106849 |
| 660 | G | A | 0.260992911 | 0.257791059 | 872 | ---- | LSEE (SEQ | 0.255312236 | 0.130213196 |
| | | | | | | | ID NO: 3572) | | |
| 613 | G | V | 0.260991628 | 0.142830183 | 534 | -Y | DS | 0.255312236 | 0.080703663 |
| 356 | --- | EKK | 0.260606313 | 0.08939761 | 765 | -- | GK | 0.255312236 | 0.10865158 |
| 419 | E | R | 0.260606313 | 0.127113021 | 28 | MK | C- | 0.255312236 | 0.091611028 |
| 62 | S | N | 0.258582734 | 0.206139171 | 826 | EK | DR | 0.255312236 | 0.103881802 |
| 716 | G | C | 0.258579754 | 0.205579693 | 302 | I | S | 0.2552956 | 0.169641843 |
| 185 | L | M | 0.258521471 | 0.171738368 | 866 | S | I | 0.255156321 | 0.209048192 |
| 407 | K | N | 0.258498581 | 0.130697064 | 472 | K | M | 0.255025429 | 0.186702335 |
| 973 | W | C | 0.258383156 | 0.162271324 | 165 | R | S | 0.25497678 | 0.100932181 |
| 419 | E | [stop] | 0.258326013 | 0.179526252 | 242 | K | R | 0.254948866 | 0.230748057 |
| 457 | R | K | 0.258323684 | 0.189885325 | 311 | --- | KLK | 0.25494628 | 0.09906032 |
| 876 | S | R | 0.258284608 | 0.118534232 | 200 | V | E | 0.254874846 | 0.123567532 |
| 19 | T | S | 0.258270715 | 0.163493921 | 129 | C | R | 0.25474894 | 0.168215252 |
| 680 | F | S | 0.258237866 | 0.129529513 | 284 | P | A | 0.254723328 | 0.141080203 |
| 2 | E | A | 0.257800465 | 0.161538463 | 232 | --- | CMG | 0.254645266 | 0.200305653 |
| 20 | K | D | 0.257606921 | 0.080857215 | 946 | N | S | 0.2545847 | 0.199844301 |
| 481 | K | E | 0.257527339 | 0.131433394 | 80 | I | V | 0.254434146 | 0.224490053 |
| 227 | A | P | 0.257425537 | 0.162403215 | 327 | G | V | 0.25442364 | 0.168129037 |
| 319 | A | G | 0.25734846 | 0.183688663 | 107 | I | V | 0.254364427 | 0.144921072 |
| 773 | R | T | 0.257312824 | 0.076585471 | 777 | R | I | 0.254281708 | 0.219559132 |
| 59 | S | R | 0.257311236 | 0.098683009 | 801 | L | P | 0.254280774 | 0.139428109 |
| 522 | G | D | 0.257141461 | 0.205906219 | 417 | Y | H | 0.254230823 | 0.102936144 |
| 164 | E | D | 0.257089377 | 0.152824439 | 251 | Q | L | 0.254085129 | 0.154282551 |
| 705 | QA | R- | 0.257083631 | 0.186668119 | 856 | Y | [stop] | 0.254033585 | 0.087466157 |
| 82 | H | Y | 0.256846745 | 0.145259346 | 753 | I | F | 0.25397349 | 0.160875608 |
| 606 | G | R | 0.256772211 | 0.222683526 | 303 | W | G | 0.253842324 | 0.162875151 |
| 281 | P | L | 0.256724807 | 0.103452649 | 852 | Y | H | 0.253666441 | 0.130229811 |
| 471 | D | Y | 0.256649107 | 0.251689277 | 223 | P | S | 0.253640033 | 0.10193396 |
| 231 | A | S | 0.256583564 | 0.187236499 | 472 | K | [stop] | 0.253606489 | 0.18360472 |
| 433 | K | N | 0.256518065 | 0.138408672 | 471 | D | N | 0.250823008 | 0.230246417 |
| 883 | S | G | 0.256375244 | 0.115658726 | 714 | R | [stop] | 0.250772621 | 0.098784657 |
| 672 | P | A | 0.256302042 | 0.169194225 | 192 | A | S | 0.25063862 | 0.18266448 |
| 681 | KD | R- | 0.256180855 | 0.206050883 | 668 | A | D | 0.250605134 | 0.186660163 |
| 762 | G | A | 0.256159485 | 0.149790153 | 147 | -- | KG | 0.250457437 | 0.166419391 |
| 774 | Q | R | 0.256113556 | 0.176872341 | 464 | IE | DR | 0.250457437 | 0.129773988 |
| 630 | P | T | 0.255980317 | 0.147464802 | 325 | -- | LK | 0.250457437 | 0.197198993 |
| 151 | H | Q | 0.255948941 | 0.118092357 | 812 | C | R | 0.250440238 | 0.175896886 |
| 38 | PDL | LT[stop] | 0.255810824 | 0.132108929 | 215 | G | C | 0.250425413 | 0.161826099 |
| 240 | LT | PV | 0.255810824 | 0.138991378 | 564 | G | D | 0.250350924 | 0.110254953 |
| 851 | T | S | 0.25343316 | 0.097399235 | 787 | A | D | 0.250325364 | 0.160958271 |
| 725 | K | E | 0.253359857 | 0.175271591 | 674 | G | V | 0.25029228 | 0.086627759 |
| 115 | V | L | 0.253354021 | 0.093695173 | 182 | T | A | 0.250160953 | 0.131790182 |
| 918 | T | I | 0.253156435 | 0.23080792 | 383 | S | R | 0.250148943 | 0.108851149 |
| 630 | P | L | 0.252953716 | 0.223745102 | 497 | E | G | 0.250036476 | 0.073841396 |
| 75 | E | Q | 0.252809731 | 0.120415311 | 154 | Y | C | 0.250036476 | 0.229055007 |
| 480 | L | M | 0.252718021 | 0.192126204 | 827 | K | R | 0.250016633 | 0.209047833 |
| 197 | S | T | 0.252713621 | 0.125864993 | 722 | Y | [stop] | 0.249927847 | 0.149439604 |
| 779 | E | Q | 0.25259488 | 0.11277405 | 380 | Y | H | 0.249902562 | 0.080398395 |
| 340 | EV | DC | 0.252472535 | 0.047624791 | 68 | K | [stop] | 0.249695921 | 0.134323821 |
| 12 | R | K | 0.252469729 | 0.189301078 | 178 | D | Y | 0.24960373 | 0.233005696 |
| 515 | A | S | 0.252433747 | 0.168422609 | 880 | D | V | 0.249521617 | 0.133706258 |
| 615 | ---- | VIEK (SEQ | 0.252369421 | 0.112001396 | 543 | K | R | 0.249512007 | 0.164262829 |
| | | ID NO: 3778) | | | | | | | |
| 513 | N | S | 0.252353713 | 0.094778563 | 101 | Q | E | 0.249509933 | 0.220597507 |
| 274 | A | P | 0.252335379 | 0.222801897 | 261 | L | P | 0.249467079 | 0.135680009 |
| 474 | E | Q | 0.252314637 | 0.161495393 | 410 | G | A | 0.249451996 | 0.157770206 |
| 898 | K | E | 0.252289386 | 0.197783073 | 916 | --------- | FETHAAEQA | 0.249445316 | 0.231377364 |
| | | | | | | | (SEQ | | |
| | | | | | | | ID NO: 3410) | | |
| 397 | Q | K | 0.252164481 | 0.217428232 | 467 | L | M | 0.249366626 | 0.154018589 |
| 455 | W | S | 0.25204917 | 0.248519347 | 745 | A | V | 0.249363082 | 0.18169323 |
| 135 | P | S | 0.252041319 | 0.143618662 | 773 | R | K | 0.249259705 | 0.143796066 |
| 500 | N | D | 0.252036438 | 0.129905572 | 221 | S | Y | 0.249177365 | 0.225580403 |
| 204 | S | I | 0.252028425 | 0.131493678 | 953 | DK | CL | 0.248980289 | 0.153230139 |
| 235 | A | T | 0.251989659 | 0.158776047 | 29 | KT | NC | 0.247444507 | 0.126896702 |
| 839 | I | M | 0.251899392 | 0.164461403 | 777 | R | G | 0.247073817 | 0.140696212 |
| 473 | D | N | 0.251700557 | 0.215226558 | 720 | R | T | 0.246870637 | 0.139065914 |
| 715 | A | D | 0.251688144 | 0.14707302 | 529 | --- | YLI | 0.246804685 | 0.066320143 |
| 352 | K | E | 0.251658395 | 0.165058904 | 977 | V | M | 0.24675063 | 0.232768749 |
| 413 | R | I | 0.251517421 | 0.230382833 | 414 | G | C | 0.246666689 | 0.173156358 |
| 272 | G | R | 0.251488679 | 0.185835986 | 487 | G | D | 0.246317089 | 0.205561043 |
| 647 | S | R | 0.251423405 | 0.100129809 | 696 | S | G | 0.246296346 | 0.111834798 |
| 333 | L | M | 0.251344003 | 0.196286065 | 515 | A | G | 0.246293045 | 0.17108612 |
| 964 | F | Y | 0.25104576 | 0.166483614 | 438 | -- | EE | 0.246243471 | 0.172505379 |
| 474 | E | K | 0.250927827 | 0.172968831 | 730 | A | S | 0.246013083 | 0.141113967 |
| 751 | M | V | 0.250846737 | 0.147715329 | 574 | N | D | 0.245981475 | 0.227302881 |
| 213 | ------ | QIGGNS | 0.248980289 | 0.134226006 | 747 | T | S | 0.245965899 | 0.17316365 |
| | | (SEQ ID NO: | | | | | | | |
| | | 3639) | | | | | | | |
| 57 | P | H | 0.248900571 | 0.215896368 | 740 | D | Y | 0.245945789 | 0.167910919 |
| 301 | V | L | 0.24886944 | 0.106508651 | 640 | R | I | 0.245900817 | 0.188813199 |
| 586 | A | P | 0.248863678 | 0.211216154 | 3 | I | F | 0.245678 | 0.179390362 |
| 909 | F | Y | 0.248749713 | 0.182356511 | 355 | N | D | 0.245670687 | 0.09594124 |
| 626 | R | T | 0.248743703 | 0.208846467 | 371 | Y | [stop] | 0.245500092 | 0.105713424 |
| 186 | G | R | 0.24871786 | 0.199871451 | 51 | P | S | 0.24544462 | 0.203086773 |
| 645 | D | N | 0.248657263 | 0.126033155 | 28 | M | L | 0.245403036 | 0.189135882 |
| 173 | K | R | 0.24855018 | 0.153000538 | 458 | A | D | 0.245377197 | 0.208634207 |
| 519 | Q | [stop] | 0.248535487 | 0.209163595 | 572 | N | I | 0.24524576 | 0.164550203 |
| 888 | R | I | 0.248471987 | 0.104169936 | 959 | E | [stop] | 0.245144817 | 0.219795779 |
| 491 | G | C | 0.248444417 | 0.204717262 | 527 | N | S | 0.245098015 | 0.16437657 |
| 527 | N | K | 0.248397784 | 0.121054149 | 321 | P | S | 0.245086017 | 0.160736605 |
| 893 | L | V | 0.248370955 | 0.162725859 | 579 | N | K | 0.244981546 | 0.165374413 |
| 379 | P | H | 0.248321642 | 0.237522233 | 707 | A | P | 0.244857358 | 0.22019856 |
| 900 | F | L | 0.248316685 | 0.187112489 | 414 | G | A | 0.244717702 | 0.113316145 |
| 974 | ----- | KPAV (SEQ | 0.24830974 | 0.09950399 | 963 | S | G | 0.244450471 | 0.188301401 |
| | | ID NO: | | | | | | | |
| | | 3518)[stop] | | | | | | | |
| 409 | H | R | 0.248289463 | 0.198716638 | 108 | D | H | 0.244382837 | 0.099322593 |
| 278 | I | T | 0.248133293 | 0.145997719 | 19 | T | R | 0.244301214 | 0.22638105 |
| 230 | ----- | DACMG | 0.248087937 | 0.141736439 | 457 | R | S | 0.244059876 | 0.203207391 |
| | | (SEQ ID NO: | | | | | | | |
| | | 3342) | | | | | | | |
| 412 | ------ | DWGKVY | 0.248000785 | 0.085936492 | 735 | R | Q | 0.243928198 | 0.170841115 |
| | | (SEQ ID NO: | | | | | | | |
| | | 3370) | | | | | | | |
| 548 | E | V | 0.244464905 | 0.11615159 | 280 | L | P | 0.243719915 | 0.122012762 |
| 135 | P | H | 0.247697198 | 0.24068468 | 529 | Y | C | 0.241113191 | 0.148105236 |
| 824 | V | E | 0.247676063 | 0.211426874 | 102 | P | S | 0.241100901 | 0.126616893 |
| 250 | H | N | 0.247644364 | 0.173527273 | 568 | P | R | 0.241086845 | 0.174639843 |
| 101 | Q | [stop] | 0.247598429 | 0.141658982 | 416 | V | L | 0.24098406 | 0.086334529 |
| 364 | F | S | 0.247520151 | 0.139448351 | 834 | G | S | 0.240965197 | 0.161966438 |
| 420 | A | G | 0.247498728 | 0.234162787 | 322 | L | M | 0.240965197 | 0.161073617 |
| 627 | Q | P | 0.243601279 | 0.172067752 | 538 | G | s | 0.240933783 | 0.072861862 |
| 571 | -- | VN | 0.243561744 | 0.078796567 | 536 | K | E | 0.240888218 | 0.130971778 |
| 25 | T | A | 0.243399906 | 0.118102255 | 676 | P | s | 0.240757682 | 0.111329254 |
| 129 | C | S | 0.243399597 | 0.045331126 | 108 | D | E | 0.240718917 | 0.12602791 |
| 522 | G | S | 0.243323907 | 0.089702225 | 217 | N | K | 0.240713475 | 0.15867648 |
| 695 | E | K | 0.243320032 | 0.148139423 | 342 | D | E | 0.24062135 | 0.069616641 |
| 603 | L | V | 0.243217969 | 0.148743728 | 471 | D | H | 0.240564636 | 0.181535186 |
| 404 | H | Q | 0.242964457 | 0.173626579 | 218 | S | N | 0.240529528 | 0.151826239 |
| 469 | E | Q | 0.242802772 | 0.126770274 | 191 | R | I | 0.240513696 | 0.229207246 |
| 484 | KWY | NSS | 0.242735572 | 0.182387025 | 963 | --- | SFY | 0.240421887 | 0.098315268 |
| 797 | L | V | 0.2425558 | 0.204091719 | 77 | K | N | 0.240381155 | 0.116252284 |
| 928 | I | F | 0.242416049 | 0.232458614 | 637 | ---- | TFER (SEQ | 0.240288787 | 0.148900082 |
| | | | | | | | ID NO: 3744) | | |
| 974 | K | R | 0.242320513 | 0.114367362 | 571 | V | L | 0.240279118 | 0.074639743 |
| 687 | P | L | 0.242304633 | 0.20007901 | 346 | M | T | 0.240147015 | 0.108146398 |
| 885 | T | R | 0.242245862 | 0.204992576 | 512 | Y | [stop] | 0.240104852 | 0.068415116 |
| 768 | T | S | 0.242193729 | 0.178836886 | 430 | G | C | 0.240047705 | 0.20806366 |
| 588 | ---- | GKRQ (SEQ | 0.242084293 | 0.124769338 | 599 | D | G | 0.239869359 | 0.206138755 |
| | | ID NO: 3440) | | | | | | | |
| 262 | ------ | ANLKD1 | 0.242084293 | 0.137081914 | 462 | F | s | 0.23971457 | 0.144092402 |
| | | (SEQ ID NO: | | | | | | | |
| | | 3325) | | | | | | | |
| 246 | I | C | 0.242084293 | 0.107590717 | 724 | S | R | 0.239681347 | 0.127922837 |
| 288 | E | [stop] | 0.242056668 | 0.219648186 | 61 | T | S | 0.239626948 | 0.164373644 |
| 978 | -[stop] | YV | 0.242009218 | 0.097706533 | 525 | K | [stop] | 0.239380142 | 0.131802154 |
| 110 | R | [stop] | 0.241965346 | 0.120709959 | 296 | V | E | 0.239355864 | 0.120748179 |
| 741 | L | M | 0.241912289 | 0.193137515 | 968 | K | Q | 0.238999998 | 0.129755167 |
| 72 | D | Y | 0.241758248 | 0.224435844 | 617 | E | K | 0.238964823 | 0.084548152 |
| 653 | N | Y | 0.24166971 | 0.0887834 | 120 | E | K | 0.238945442 | 0.100801456 |
| 324 | R | [stop] | 0.241651421 | 0.106997792 | 44 | L | V | 0.238860984 | 0.10949901 |
| 293 | Y | D | 0.241440886 | 0.202068751 | 315 | G | R | 0.238751925 | 0.215543005 |
| 695 | E | A | 0.241330438 | 0.115436697 | 87 | E | [stop] | 0.238731064 | 0.177299521 |
| 798 | -------- | SKTLAQYT | 0.241309883 | 0.196326087 | 204 | S | C | 0.236855446 | 0.164372504 |
| | | (SEQ ID NO: | | | | | | | |
| | | 3714) | | | | | | | |
| 866 | S | G | 0.241237257 | 0.109329768 | 82 | H | Q | 0.236837713 | 0.172606609 |
| 818 | S | G | 0.238509249 | 0.201919192 | 861 | ------- | VVKDLSVE | 0.236770505 | 0.195127344 |
| | | | | | | | (SEQ ID NO: | | |
| | | | | | | | 3837) | | |
| 189 | G | V | 0.238447609 | 0.179422249 | 493 | P | L | 0.236700832 | 0.181806123 |
| 394 | A | D | 0.238439863 | 0.125867824 | 474 | E | G | 0.236695789 | 0.180206764 |
| 861 | - | V | 0.238439176 | 0.202222792 | 302 | I | F | 0.236588615 | 0.136160472 |
| 357 | K | E | 0.238434177 | 0.184905545 | 109 | Q | R | 0.236576305 | 0.166840659 |
| 353 | L | V | 0.23831895 | 0.17206072 | 97 | S | R | 0.236508024 | 0.179878709 |
| 488 | D | V | 0.2382354 | 0.188903119 | 40 | L | V | 0.236210141 | 0.21459356 |
| 684 | ----- | LGNPT (SEQ | 0.2382268 | 0.157487774 | 761 | F | C | 0.236145536 | 0.170046245 |
| | | ID NO: 3549) | | | | | | | |
| 376 | A | V | 0.238191318 | 0.142572457 | 50 | K | N | 0.236137845 | 0.22219675 |
| 349 | N | D | 0.238174065 | 0.053089179 | 205 | N | K | 0.236073257 | 0.12180008 |
| 331 | F | S | 0.238131141 | 0.093269792 | 399 | G | D | 0.236045787 | 0.181873656 |
| 971 | E | D | 0.238076025 | 0.194709418 | 521 | D | Y | 0.235934057 | 0.180076567 |
| 775 | Y | F | 0.238057448 | 0.214475137 | 665 | A | D | 0.235822456 | 0.220273467 |
| 730 | A | T | 0.238038323 | 0.175731569 | 252 | K | R | 0.235675801 | 0.120466673 |
| 631 | --- | ALF | 0.237949975 | 0.190053084 | 646 | S | R | 0.235675637 | 0.183914638 |
| 504 | D | H | 0.23794567 | 0.139048842 | 102 | P | A | 0.235653058 | 0.16760539 |
| 94 | G | D | 0.237937578 | 0.15570335 | 810 | S | N | 0.235539825 | 0.164257896 |
| 291 | E | [stop] | 0.237828954 | 0.19900832 | 936 | R | S | 0.235496123 | 0.188093786 |
| 871 | R | I | 0.237759309 | 0.236033629 | 111 | K | R | 0.235492778 | 0.118354865 |
| 761 | F | Y | 0.237669703 | 0.128380283 | 220 | A | V | 0.235467868 | 0.198253635 |
| 910 | ---- | VCLN (SEQ | 0.237633429 | 0.152561858 | 855 | --- | RYK | 0.235222552 | 0.156668306 |
| | | ID NO: 3768) | | | | | | | |
| 731 | D | Y | 0.237566392 | 0.167223625 | 354 | I | N | 0.235178848 | 0.098023234 |
| 245 | D | A | 0.237553897 | 0.189220496 | 158 | C | F | 0.235135625 | 0.169427052 |
| 979 | L-E | VWS | 0.237546222 | 0.150693183 | 689 | H | R | 0.235102048 | 0.220671524 |
| 208 | V | E | 0.237546113 | 0.17752812 | 594 | E--F | GRII (SEQ ID | 0.235051862 | 0.132444365 |
| | | | | | | | NO: 3451) | | |
| 483 | Q | R | 0.23746372 | 0.159123209 | 154 | Y | D | 0.234980588 | 0.232501764 |
| 634 | V | M | 0.237398857 | 0.152995502 | 870 | D | V | 0.234951394 | 0.118777361 |
| 837 | T | I | 0.237183554 | 0.104666535 | 198 | I | N | 0.234906329 | 0.184047389 |
| 479 | E | Q | 0.237085358 | 0.157162064 | 76 | M | I | 0.234796263 | 0.126238567 |
| 555 | F | V | 0.237065318 | 0.182110462 | 434 | H | N | 0.234726089 | 0.143174214 |
| 872 | LS | PV | 0.23698628 | 0.179042308 | 570 | E | Q | 0.232497705 | 0.099759258 |
| 601 | L | P | 0.236954247 | 0.122470012 | 645 | D | E | 0.2323596 | 0.127143455 |
| 127 | F | L | 0.236892252 | 0.129435749 | 54 | I | N | 0.23228755 | 0.182788712 |
| 484 | --KW | NSSL (SEQ | 0.234680329 | 0.165662856 | 725 | K | R | 0.232253631 | 0.11253677 |
| | | ID NO: 3599) | | | | | | | |
| 49 | K | [stop] | 0.234415257 | 0.114263318 | 771 | A | S | 0.232158252 | 0.16845905 |
| 896 | L | P | 0.234287413 | 0.192149813 | 896 | L | V | 0.232108864 | 0.141878039 |
| 530 | L | V | 0.234192802 | 0.173965176 | 487 | G | V | 0.232053935 | 0.22651513 |
| 643 | V | A | 0.234106948 | 0.176627185 | 655 | I | V | 0.231994505 | 0.148078533 |
| 711 | E | K | 0.234002178 | 0.154011045 | 708 | K | R | 0.231988811 | 0.183732743 |
| 918 | ----- | THAAEQ | 0.23373891 | 0.117744474 | 699 | E | D | 0.231934703 | 0.178386576 |
| | | (SEQ ID NO: | | | | | | | |
| | | 3747) | | | | | | | |
| 473 | D | E | 0.233630727 | 0.181285916 | 446 | A | P | 0.231896096 | 0.131534649 |
| 666 | V | E | 0.233615017 | 0.210063502 | 902 | H | P | 0.231793863 | 0.226418313 |
| 610 | ------- | LANGRVIE | 0.233598549 | 0.098900798 | 555 | F | S | 0.231772683 | 0.154329003 |
| | | (SEQ ID NO: | | | | | | | |
| | | 3538) | | | | | | | |
| 463 | V | A | 0.233582437 | 0.13705941 | 685 | G | R | 0.231646911 | 0.113490558 |
| 771 | A | V | 0.233335501 | 0.144017771 | 430 | G | A | 0.231581897 | 0.168869877 |
| 89 | Q | H | 0.233314663 | 0.120225936 | 423 | R | G | 0.231294589 | 0.188648387 |
| 18 | N | D | 0.233234266 | 0.100130745 | 773 | R | S | 0.231238362 | 0.139470334 |
| 547 | P | A | 0.233232691 | 0.192665943 | 148 | --- | GKP | 0.231166477 | 0.084708483 |
| 628 | D | H | 0.233191566 | 0.113338873 | 795 | TY | PG | 0.231166477 | 0.229360354 |
| 290 | I | V | 0.233178351 | 0.147527858 | 598 | N | S | 0.230890539 | 0.114382772 |
| 837 | ---- | TTIN (SEQ ID | 0.233038063 | 0.141130326 | 109 | Q | [stop] | 0.230738213 | 0.089332392 |
| | | NO: 3761) | | | | | | | |
| 909 | -- | FV | 0.233038063 | 0.131142006 | 481 | ---- | KLQK (SEQ | 0.23071553 | 0.20441951 |
| | | | | | | | ID NO: 3513) | | |
| 260 | R | G | 0.232970656 | 0.120191772 | 592 | -GR | DNQ | 0.230655892 | 0.071944702 |
| 707 | ------- | AKEVEQR | 0.232896265 | 0.116012039 | 254 | I | T | 0.2306357 | 0.069580284 |
| | | (SEQ ID NO: | | | | | | | |
| | | 3314) | | | | | | | |
| 638 | F | S | 0.232893598 | 0.149395863 | 530 | L | R | 0.230571343 | 0.193066361 |
| 671 | D | A | 0.232880356 | 0.163658679 | 365 | W | [stop] | 0.230333383 | 0.12753339 |
| 443 | S | T | 0.232784832 | 0.170920909 | 131 | Q | R | 0.2302555 | 0.206903114 |
| 392 | K | N | 0.232687633 | 0.108105318 | 244 | Q | E | 0.230190451 | 0.222512927 |
| 500 | N | I | 0.232640715 | 0.1305158 | 900 | F | I | 0.230181139 | 0.149890666 |
| 111 | K | E | 0.232613623 | 0.097737029 | 318 | E | Q | 0.230160478 | 0.212890421 |
| 610 | L | V | 0.229644521 | 0.180175813 | 312 | L | M | 0.230110955 | 0.204915228 |
| 847 | E | G | 0.229640073 | 0.111868196 | 106 | N | S | 0.230101564 | 0.155287559 |
| 636 | -- | LT | 0.229485665 | 0.192188426 | 968 | K | R | 0.230017803 | 0.168949701 |
| 665 | A | G | 0.229408129 | 0.212381399 | 631 | A | P | 0.229723383 | 0.159718894 |
| 82 | H | R | 0.229295108 | 0.108155794 | 864 | D | G | 0.226094276 | 0.177950676 |
| 371 | Y | D | 0.229277426 | 0.117283148 | 140 | K | R | 0.226067524 | 0.114127554 |
| 148 | G | V | 0.229238098 | 0.159823444 | 814 | F | S | 0.225959256 | 0.114511043 |
| 443 | S | I | 0.229142738 | 0.169822985 | 215 | G | D | 0.225350951 | 0.086324983 |
| 660 | G | C | 0.229029418 | 0.194710612 | 138 | V | L | 0.225143743 | 0.155359682 |
| 181 | V | D | 0.228966959 | 0.164951106 | 192 | A | T | 0.22512485 | 0.144695235 |
| 832 | A | P | 0.228767879 | 0.092204547 | 502 | I | S | 0.225038868 | 0.197567126 |
| 152 | T | A | 0.228705386 | 0.182569685 | 494 | F | V | 0.224968248 | 0.143764694 |
| 685 | G | A | 0.228675631 | 0.17392363 | 162 | E | D | 0.224950043 | 0.153078143 |
| 112 | L | P | 0.22866263 | 0.221195984 | 788 | Y | [stop] | 0.22492674 | 0.129943744 |
| 214 | I | T | 0.22857342 | 0.11423526 | 263 | N | I | 0.224722541 | 0.117014395 |
| 610 | L | M | 0.22841473 | 0.205382368 | 918 | ------- | THAAEQA | 0.224719714 | 0.202778103 |
| | | | | | | | (SEQ ID NO: | | |
| | | | | | | | 3748) | | |
| 110 | R | G | 0.228257249 | 0.086720324 | 272 | G | A | 0.224696933 | 0.211543463 |
| 590 | R | S | 0.228041456 | 0.143022556 | 322 | L | V | 0.2246772 | 0.156881144 |
| 596 | I | M | 0.227907909 | 0.117874099 | 132 | C | R | 0.224659007 | 0.146010501 |
| 1 | Q | P | 0.227785203 | 0.168369144 | 657 | I | F | 0.224649177 | 0.161870244 |
| 567 | V | E | 0.227660557 | 0.156302233 | 917 | - | E | 0.224592553 | 0.150266826 |
| 32 | L | V | 0.227635279 | 0.12966479 | 704 | ------ | IQAAKE | 0.224567514 | 0.109443666 |
| | | | | | | | (SEQ ID NO: | | |
| | | | | | | | 3481) | | |
| 65 | N | S | 0.22749218 | 0.063907676 | 328 | --- | FPS | 0.224567514 | 0.088644166 |
| 291 | E | G | 0.227296993 | 0.128103388 | 455 | W | R | 0.224240948 | 0.159412878 |
| 635 | A | V | 0.22713711 | 0.159876533 | 528 | -- | LY | 0.224210461 | 0.204469226 |
| 894 | S | I | 0.227093532 | 0.165363718 | 289 | G | A | 0.224158556 | 0.07475664 |
| 675 | C | R | 0.227077437 | 0.19145584 | 477 | RCE | SFS | 0.224109734 | 0.175971589 |
| 863 | K | E | 0.227027728 | 0.176903569 | 290 | I | M | 0.224106784 | 0.121750806 |
| 130 | S | N | 0.226933191 | 0.162445952 | 699 | EK | AV | 0.223971566 | 0.120407858 |
| 187 | K | E | 0.226883263 | 0.185467572 | 190 | ------ | QRALDFY | 0.223971566 | 0.118248938 |
| | | | | | | | (SEQ ID NO: | | |
| | | | | | | | 3646) | | |
| 330 | S | G | 0.226753105 | 0.138020012 | 287 | K | [stop] | 0.223966216 | 0.119362605 |
| 224 | V | A | 0.226536103 | 0.153342124 | 33 | V | A | 0.223884337 | 0.200194354 |
| 802 | A | T | 0.226368502 | 0.154358709 | 321 | P | R | 0.223833871 | 0.153353055 |
| 148 | G | S | 0.226168476 | 0.097680006 | 149 | K | [stop] | 0.221989288 | 0.160692576 |
| 732 | D | E | 0.226134547 | 0.109002487 | 230 | --- | DAC | 0.221929991 | 0.119956442 |
| 350 | V | L | 0.223803585 | 0.123552417 | 559 | -I | TV | 0.221929991 | 0.162385076 |
| 598 | N | D | 0.223755594 | 0.127015451 | 125 | S | T | 0.221924231 | 0.192354491 |
| 784 | A | V | 0.22374846 | 0.140061096 | 738 | A | P | 0.221764129 | 0.166374434 |
| 540 | L | P | 0.223660834 | 0.130300184 | 389 | K | L | 0.221512528 | 0.096823472 |
| 330 | S | R | 0.2236138 | 0.142019721 | 829 | K | M | 0.22130603 | 0.111760034 |
| 162 | E | Q | 0.223613045 | 0.201165398 | 435 | I | V | 0.221227154 | 0.143247597 |
| 128 | A | V | 0.223401934 | 0.126557909 | 626 | R | S | 0.221038435 | 0.198631408 |
| 296 | V | L | 0.223401818 | 0.13392173 | 135 | P | R | 0.221017429 | 0.116069626 |
| 634 | V | E | 0.223309652 | 0.118175475 | 203 | E | Q | 0.22076143 | 0.119826394 |
| 356 | E | Q | 0.22323735 | 0.143945409 | 783 | T | I | 0.220740744 | 0.134860122 |
| 289 | G | V | 0.223202197 | 0.145913012 | 672 | P | S | 0.220729114 | 0.141569742 |
| 805 | T | N | 0.223188037 | 0.139245678 | 361 | G | D | 0.220639166 | 0.141910298 |
| 599 | D | Y | 0.223008187 | 0.183323322 | 690 | I | M | 0.220631897 | 0.180897111 |
| 246 | I | M | 0.222998811 | 0.092368092 | 552 | A | G | 0.220614882 | 0.110523427 |
| 36 | M | K | 0.222893666 | 0.113406903 | 441 | R | I | 0.220543521 | 0.155159451 |
| 476 | C | [stop] | 0.222743024 | 0.176188321 | 218 | S | R | 0.220420945 | 0.153071466 |
| 464 | I | V | 0.222701858 | 0.18421718 | 917 | ------ | ETHAAE | 0.220288736 | 0.09840913 |
| | | | | | | | (SEQ ID NO: | | |
| | | | | | | | 3400) | | |
| 224 | V | L | 0.222626458 | 0.136476862 | 204 | S | R | 0.220214876 | 0.101819626 |
| 42 | E | G | 0.22255062 | 0.189996134 | 255 | K | E | 0.220080844 | 0.12573371 |
| 832 | A | S | 0.222538216 | 0.190249328 | 479 | E | D | 0.220079089 | 0.099777598 |
| 734 | V | I | 0.222476682 | 0.141366416 | 438 | E | G | 0.219979549 | 0.120742867 |
| 146 | D | H | 0.22246095 | 0.16577062 | 605 | T | 1 | 0.219976898 | 0.126979027 |
| 755 | AN | DS | 0.222404547 | 0.10970681 | 109 | Q | E | 0.219959218 | 0.140761458 |
| 581 | I | V | 0.222357666 | 0.17105795 | 744 | Y | C | 0.219956045 | 0.132833086 |
| 698 | K | [stop] | 0.222296953 | 0.103211977 | 930 | ------ | RSWLFL | 0.219822658 | 0.120132898 |
| | | | | | | | (SEQ ID NO: | | |
| | | | | | | | 3689) | | |
| 507 | G | D | 0.22225927 | 0.153400026 | 172 | H | Q | 0.219757029 | 0.10461302 |
| 246 | I | V | 0.222098073 | 0.120973819 | 329 | P | A | 0.219753668 | 0.110968401 |
| 47 | L | P | 0.222066189 | 0.162841956 | 783 | T | S | 0.219504994 | 0.118049041 |
| 301 | VI | CL | 0.222059585 | 0.122617461 | 610 | L | P | 0.219499239 | 0.160199117 |
| 210 | PL | DR | 0.222059585 | 0.108090576 | 433 | --- | KHI | 0.216309574 | 0.092546366 |
| 174 | ------ | PEANDE | 0.222059585 | 0.182232379 | 375 | E | [stop] | 0.216261145 | 0.199757211 |
| | | (SEQ ID NO: | | | | | | | |
| | | 3616) | | | | | | | |
| 160 | --- | VSE | 0.222059585 | 0.137662445 | 297 | V | A | 0 216143366 | 0.15509483 |
| 68 | K | E | 0.222044865 | 0.16348242 | 148 | ------- | GKPHTNYF | 0.216132461 | 0.211503255 |
| | | | | | | | (SEQ ID NO: | | |
| | | | | | | | 3439) | | |
| 38 | P | A | 0.219404694 | 0.107368636 | 645 | D | V | 0.21604012 | 0.117781298 |
| 446 | A | V | 0.218887024 | 0.176662627 | 147 | KG | R- | 0.215998635 | 0.103939398 |
| 41 | R | K | 0.218858764 | 0.128896181 | 292 | A | S | 0.215943856 | 0.157240024 |
| 810 | S | R | 0.21870856 | 0.129689435 | 387 | R | G | 0.215798372 | 0.151215331 |
| 83 | V | L | 0.218625171 | 0.138945755 | 157 | R | T | 0.215790548 | 0.152247144 |
| 474 | E | D | 0.218570822 | 0.130400355 | 203 | E | K | 0.215703649 | 0.168783031 |
| 712 | Q | [stop] | 0.218254094 | 0.091444311 | 123 | T | S | 0.21570133 | 0.105624839 |
| 371 | Y | H | 0.218137961 | 0.189187449 | 383 | S | G | 0.215603433 | 0.137401501 |
| 35 | V | L | 0.218110612 | 0.095949997 | 310 | Q | [stop] | 0.21551735 | 0.135329921 |
| 687 | P | R | 0.21806458 | 0.159278352 | 592 | G | A | 0.215456343 | 0.13373272 |
| 621 | Y | N | 0.218036238 | 0.089590425 | 562 | K | R | 0.215325036 | 0.122831356 |
| 753 | I | N | 0.21792347 | 0.101271232 | 951 | N | S | 0.21531813 | 0.214926405 |
| 337 | Q | L | 0.217694196 | 0.180223104 | 823 | R | I | 0.215273573 | 0.191310901 |
| 366 | Q | E | 0.217564323 | 0.195945495 | 723 | A | P | 0.215193332 | 0.108699964 |
| 156 | G | R | 0.217510036 | 0.186872459 | 713 | R | T | 0.215008884 | 0.104394548 |
| 813 | G | A | 0.217404463 | 0.109971024 | 878 | N | I | 0.214931515 | 0.11752804 |
| 911 | C | W | 0.217360044 | 0.181625646 | 145 | N | H | 0.214892161 | 0.185408691 |
| 896 | L | Q | 0.217312492 | 0.09770592 | 338 | A | T | 0.21480521 | 0.15310635 |
| 395 | R | S | 0.217267056 | 0.103436045 | 169 | L | V | 0.214751891 | 0.163877193 |
| 506 | S | R | 0.217238346 | 0.104753923 | 30 | T | P | 0.214714414 | 0.144104489 |
| 459 | KA | NR | 0.217171538 | 0.126085081 | 164 | E | A | 0.214693055 | 0.151750991 |
| 605 | T | S | 0.217140582 | 0.104288213 | 734 | V | F | 0.214507965 | 0.184315198 |
| 147 | K | R | 0.217113942 | 0.165662771 | 841 | G | V | 0.21449654 | 0.163419397 |
| 358 | K | R | 0.217018444 | 0.148484962 | 848 | G | D | 0.214491489 | 0.166744246 |
| 710 | V | E | 0.216906218 | 0.158321415 | 93 | VGL | WA [stop] | 0.21434042 | 0.171347302 |
| 948 | T | N | 0.216794988 | 0.204294035 | 747 | T | K | 0.214238165 | 0.122971462 |
| 62 | S | T | 0.216604466 | 0.167204921 | 688 | T | K | 0.214222271 | 0.126368648 |
| 827 | K | E | 0.216603742 | 0.107241416 | 878 | N | Y | 0.214205323 | 0.111547616 |
| 457 | R | G | 0.216513116 | 0.052626339 | 190 | Q | E | 0.214170887 | 0.122424442 |
| 159 | N | K | 0.216507269 | 0.109954763 | 901 | ------ | SHRPVQE | 0.212684828 | 0.084903934 |
| | | | | | | | (SEQ ID NO: | | |
| | | | | | | | 3707) | | |
| 177 | N | D | 0.216431319 | 0.179290406 | 459 | K | E | 0.212680715 | 0.093525423 |
| 921 | ------- | AEQAALN | 0.216389396 | 0.149922966 | 228 | L | V | 0.212591965 | 0.092947468 |
| | | (SEQ ID NO: | | | | | | | |
| | | 3308) | | | | | | | |
| 633 | -- | FV | 0.216309574 | 0.179645361 | 831 | T | I | 0.212576099 | 0.16705965 |
| 523 | | VKKLN (SEQ | 0.214126014 | 0.14801882 | 819 | A | T | 0.212522918 | 0.164976137 |
| | | ID NO: 3782) | | | | | | | |
| 792 | --- | PSK | 0.214126014 | 0.088425611 | 645 | D | G | 0.21251225 | 0.121902674 |
| 171 | --- | PHK | 0.214126014 | 0.186440571 | 794 | K | R | 0.212502396 | 0.178916123 |
| 918 | -- | TH | 0.214126014 | 0.10224323 | 859 | Q | P | 0.212311083 | 0.170329714 |
| 833 | T | S | 0.214086868 | 0.0993742 | 738 | A | G | 0.212248976 | 0.161293316 |
| 72 | D | E | 0.214062412 | 0.115630034 | 409 | H | Q | 0.212187222 | 0.201696134 |
| 560 | N | K | 0.213945541 | 0.173784949 | 192 | ----- | ALDFY (SEQ | 0.212165997 | 0.132724298 |
| | | | | | | | ID NO: 3317) | | |
| 906 | Q | L | 0.213845132 | 0.187470303 | 782 | ------ | LTAKLA | 0.212165997 | 0.121732843 |
| | | | | | | | (SEQ ID NO: | | |
| | | | | | | | 3580) | | |
| 461 | S | I | 0.21384342 | 0.180386801 | 86 | EEF | DCL | 0.212165997 | 0.090389548 |
| 622 | N | I | 0.213809938 | 0.161761781 | 251 | Q | H | 0.212109948 | 0.151365816 |
| 768 | T | I | 0.213809607 | 0.08102538 | 197 | S | R | 0.211641987 | 0.087103971 |
| 204 | --- | SNH | 0.21345676 | 0.114570097 | 196 | Y | C | 0.211596178 | 0.195825393 |
| 944 | - | Q | 0.213449244 | 0.157411492 | 125 | S | I | 0.211507893 | 0.117116373 |
| 49 | K | R | 0.213334728 | 0.181645679 | 237 | A | T | 0.211485023 | 0.118730598 |
| 411 | E | [stop] | 0.213222053 | 0.149931485 | 574 | N | S | 0.211257767 | 0.135650502 |
| 719 | S | A | 0.213134782 | 0.140566151 | 73 | Y | C | 0.211200986 | 0.169366394 |
| 731 | D | E | 0.213022905 | 0.120709041 | 380 | Y | [stop] | 0.21093329 | 0.132735624 |
| 475 | F | S | 0.213010505 | 0.137035236 | 219 | C | Y | 0.210905605 | 0.190298454 |
| 305 | N | K | 0.213008678 | 0.108878566 | 777 | R | S | 0.210879382 | 0.15535129 |
| 30 | TL | PC | 0.212945774 | 0.075648365 | 799 | ------ | KTLAQYT | 0.210719207 | 0.130227708 |
| | | | | | | | (SEQ ID NO: | | |
| | | | | | | | 3530) | | |
| 611 | A | G | 0.212935031 | 0.195766935 | 79 | A | T | 0.210637972 | 0.047863719 |
| 266 | DI | AV | 0.212926287 | 0.127744646 | 654 | L | R | 0.210450467 | 0.143325776 |
| 730 | ---- | ADDM (SEQ | 0.212926287 | 0.097551919 | 479 | E | K | 0.210277517 | 0.147945245 |
| | | ID NO: 3302) | | | | | | | |
| 684 | -- | LG | 0.212926287 | 0.093015719 | 595 | F | I | 0.208631842 | 0.129889087 |
| 979 | LE[stop]GSPG | VSSKDLK | 0.212926287 | 0.091900005 | 765 | G | R | 0.208575469 | 0.10091353 |
| | (SEQ ID NO: | (SEQ ID NO: | | | | | | | |
| | 3251) | 3808) | | | | | | | |
| 241 | ---- | TKYQ (SEQ | 0.212926287 | 0.1464038 | 506 | S | G | 0.208540925 | 0.155512988 |
| | | ID NO: 3751) | | | | | | | |
| 949 | T | I | 0.212862846 | 0.194719268 | 408 | K | R | 0.208534867 | 0.133392724 |
| 709 | E | G | 0.212846074 | 0.116849712 | 171 | P | A | 0.208511912 | 0.145333852 |
| 926 | -- | LN | 0.212734596 | 0.151263965 | 953 | -- | DK | 0.208375969 | 0.185478366 |
| 587 | F | E | 0.210211385 | 0.204490333 | 518 | W | C | 0.208374964 | 0.121746678 |
| 444 | E | Q | 0.210197326 | 0.171958409 | 34 | R | G | 0.208371871 | 0.100655798 |
| 546 | K | Q | 0.210196739 | 0.176398222 | 663 | ---- | IPAV (SEQ ID | 0.208314284 | 0.125213293 |
| | | | | | | | NO: 3479) | | |
| 645 | D | Y | 0.210085231 | 0.190055155 | 737 | T | S | 0.208225559 | 0.129504354 |
| 67 | N | S | 0.210019556 | 0.13100266 | 6 | I | N | 0.208110644 | 0.078448603 |
| 403 | L | P | 0.209919624 | 0.075615563 | 677 | L | M | 0.208075234 | 0.142372791 |
| 452 | L | P | 0.209882094 | 0.127675947 | 456 | L | Q | 0.208040599 | 0.142959764 |
| 733 | M | V | 0.209851123 | 0.136163056 | 190 | Q | R | 0.207948331 | 0.189816674 |
| 872 | L | P | 0.209831548 | 0.152338232 | 382 | S | G | 0.207889255 | 0.137324724 |
| 882 | S | R | 0.209789855 | 0.108285285 | 953 | D | H | 0.207762178 | 0.180457041 |
| 679 | R | T | 0.209762925 | 0.169692137 | 522 | G | R | 0.207711735 | 0.201735272 |
| 553 | ------- | NRFYTVI | 0.209733011 | 0.13607198 | 655 | I | F | 0.207554053 | 0.114186846 |
| | | (SEQ ID NO: | | | | | | | |
| | | 3596) | | | | | | | |
| 650 | ---- | KPMN (SEQ | 0.209706804 | 0.099600175 | 345 | D | N | 0.207459671 | 0.194429167 |
| | | ID NO: 3523) | | | | | | | |
| 802 | AQ | DR | 0.209706804 | 0.100831295 | 619 | T | A | 0.20742287 | 0.107807162 |
| 415 | K | R | 0.209696722 | 0.172211853 | 273 | L | M | 0.207369167 | 0.150911133 |
| 470 | A | P | 0.209480997 | 0.11945606 | 695 | E | G | 0.207324806 | 0.170023455 |
| 389 | K | R | 0.209459216 | 0.190864781 | 662 | N | S | 0.207198335 | 0.146245893 |
| 233 | M | K | 0.209263613 | 0.148910419 | 102 | P | R | 0.2071 03872 | 0.104479817 |
| 846 | V | A | 0.209194154 | 0.132301095 | 212 | E | G | 0.207077093 | 0.167731322 |
| 803 | Q | R | 0.209112961 | 0.157007924 | 118 | G | V | 0.20699607 | 0.113451465 |
| 594 | -EF | GRI | 0.209067243 | 0.142920346 | 841 | G | R | 0.20698149 | 0.160303912 |
| 418 | D | Y | 0.208952621 | 0.201914561 | 501 | S | R | 0.206963691 | 0.188972116 |
| 424 | I | N | 0.208940616 | 0.184257414 | 402 | L | M | 0.206953352 | 0.103953797 |
| 152 | ----- | TNYFG (SEQ | 0.208921679 | 0.069015043 | 642 | ------- | EVLDSSN | 0.206944663 | 0.088763805 |
| | | ID NO: 3756) | | | | | (SEQ ID NO: | | |
| | | | | | | | 3406) | | |
| 184 | ------- | SLGKFGQ | 0.208921679 | 0.145515626 | 448 | S | C | 0.205480956 | 0.165327281 |
| | | (SEQ ID NO: | | | | | | | |
| | | 3717) | | | | | | | |
| 944 | ---- | QTNK (SEQ | 0.208921679 | 0.115799997 | 341 | V | L | 0.205333121 | 0.121382241 |
| | | ID NO: 3652) | | | | | | | |
| 435 | IK | DR | 0.208921679 | 0.100379476 | 351 | K | [stop] | 0.205260708 | 0.137391414 |
| 926 | LN | PV | 0.208921679 | 0.122257143 | 408 | K | [stop] | 0.205233141 | 0.101895161 |
| 31 | L | P | 0.208720548 | 0.120146815 | 626 | R | [stop] | 0.204917321 | 0.133170214 |
| 426 | ------ | KKVEGLS | 0.206944663 | 0.120828794 | 426 | K | N | 0.204813329 | 0.115277631 |
| | | (SEQ ID NO: | | | | | | | |
| | | 3507) | | | | | | | |
| 273 | -- | LA | 0.206944663 | 0.200099204 | 217 | N | D | 0.204605492 | 0.15571936 |
| 631 | AL | DR | 0.206944663 | 0.132545056 | 55 | P | A | 0.204494052 | 0.203454056 |
| 75 | E | V | 0.206746722 | 0.108008381 | 979 | L--E | VSSK (SEQ | 0.204463305 | 0.104199954 |
| | | | | | | | ID NO: 3797) | | |
| 159 | ------ | NVSEHER | 0.206678079 | 0.108971025 | 789 | EG | GD | 0.204429605 | 0.094907378 |
| | | (SEQ ID NO: | | | | | | | |
| | | 3606) | | | | | | | |
| 974 | - | K | 0.206678079 | 0.087902725 | 174 | P | H | 0.204410022 | 0.192547659 |
| 13 | L | T | 0.206678079 | 0.17404612 | 37 | T | I | 0.20435056 | 0.108024009 |
| 135 | P | L | 0.206613655 | 0.11493052 | 230 | D | Y | 0.204310577 | 0.163888419 |
| 576 | D | N | 0.206571359 | 0.197674836 | 369 | A | D | 0.204246596 | 0.143255593 |
| 396 | -- | YQ | 0.206474109 | 0.165665557 | 567 | V | L | 0.204221782 | 0.133245956 |
| 426 | K | R | 0.206261752 | 0.175070461 | 356 | E | G | 0.204079788 | 0.096784994 |
| 720 | R | S | 0.206187746 | 0.130762963 | 826 | E | G | 0.204045427 | 0.079692638 |
| 731 | D | H | 0.206140141 | 0.18515674 | 234 | ------ | GAVASF | 0.203921342 | 0.148635343 |
| | | | | | | | (SEQ ID NO: | | |
| | | | | | | | 3423) | | |
| 792 | ----- | PSKTY (SEQ | 0.206037621 | 0.119445689 | 791 | - | LP | 0.203921342 | 0.086381396 |
| | | ID NO: 3623) | | | | | | | |
| 470 | ------ | ADKDEFC | 0.206037621 | 0.160849031 | 550 | F | Y | 0.203856294 | 0.154808557 |
| | | (SEQ ID NO: | | | | | | | |
| | | 3306) | | | | | | | |
| 846 | ---- | VEGQ (SEQ | 0.205946011 | 0.115023996 | 139 | Y | H | 0.203748432 | 0.112669732 |
| | | ID NO: 3773) | | | | | | | |
| 730 | ----- | ADDMV | 0.205946011 | 0.203904239 | 842 | K | E | 0.203739019 | 0.14619773 |
| | | (SEQ ID NO: | | | | | | | |
| | | 3303) | | | | | | | |
| 195 | F | S | 0.205931771 | 0.0997168 | 565 | E | D | 0.203689065 | 0.115937226 |
| 763 | R | G | 0.205931024 | 0.177755816 | 667 | IA | TV | 0.203650432 | 0.146532587 |
| 668 | A | G | 0.205831825 | 0.181720031 | 554 | ----- | RFYTV (SEQ | 0.203650432 | 0.085651298 |
| | | | | | | | ID NO: 3666) | | |
| 123 | T | I | 0.205810457 | 0.169798366 | 481 | ----- | KLQKW | 0.203650432 | 0.173739202 |
| | | | | | | | (SEQ ID NO: | | |
| | | | | | | | 3514) | | |
| 394 | A | G | 0.205790009 | 0.129212763 | 64 | A | V | 0.203579261 | 0.147026682 |
| 776 | T | N | 0.205770287 | 0.088016724 | 429 | E | K | 0.203478388 | 0.197959656 |
| 779 | E | D | 0.205703015 | 0.117547264 | 659 | R | W | 0.203469266 | 0.155374384 |
| 787 | A | G | 0.205542455 | 0.113825299 | 644 | L | M | 0.201626647 | 0.191409491 |
| 775 | Y | [stop] | 0.203457477 | 0.112309611 | 326 | K | E | 0.201516415 | 0.172628702 |
| 420 | A | P | 0.203276202 | 0.137871454 | 584 | P | T | 0.201277532 | 0.157595812 |
| 844 | -- | LK | 0.20327417 | 0.108693201 | 216 | G | A | 0.201151425 | 0.135718161 |
| 543 | KK | DR | 0.20327417 | 0.081409516 | 158 | C | R | 0.200895575 | 0.132515505 |
| 483 | QK | DR | 0.203103924 | 0.108226373 | 557 | T | P | 0.20079665 | 0.175823626 |
| 661 | E---N | DHSRD (SEQ | 0.203103924 | 0.080468187 | 615 | ------- | VIEKTLY | 0.20079665 | 0.14533527 |
| | | ID NO: 3355) | | | | | (SEQ ID NO: | | |
| | | | | | | | 3779) | | |
| 591 | -------- | QGREFIWN | 0.203103924 | 0.127711804 | 121 | R | I | 0.200425228 | 0.146944719 |
| | | (SEQ ID NO: | | | | | | | |
| | | 3637) | | | | | | | |
| 434 | ----- | HIKLE (SEQ | 0.203103924 | 0.128782985 | 67 | N | K | 0.200404848 | 0.19495599 |
| | | ID NO: 3461) | | | | | | | |
| 192 | A | D | 0.203101012 | 0.088663269 | 258 | E | G | 0.200396788 | 0.144009482 |
| 979 | LE | VW | 0.203097285 | 0.114357374 | 232 | -- | CM | 0.200312143 | 0.13867079 |
| 905 | V | E | 0.2029568 | 0.158582123 | 526 | -- | LN | 0.200312143 | 0.15960761 |
| 648 | N | K | 0.202865781 | 0.076554962 | 202 | -RE | SSS | 0.200312143 | 0.113603268 |
| 811 | N | D | 0.202736819 | 0.184175153 | 68 | K | T | 0.200238961 | 0.196349346 |
| 573 | F | Y | 0.202703202 | 0.143842683 | 448 | S | Y | 0.200204468 | 0.144800694 |
| 388 | K | E | 0.202623765 | 0.1173393 | 837 | --- | TTI | 0.200162181 | 0.089943784 |
| 265 | K | [stop] | 0.202622408 | 0.159704419 | 158 | ----- | CNVSE (SEQ | 0.200162181 | 0.088327822 |
| | | | | | | | ID NO: 3339) | | |
| 511 | Q | E | 0.202512176 | 0.199826141 | 796 | ------- | YLSKTLA | 0.200048174 | 0.1285851 |
| | | | | | | | (SEQ ID NO: | | |
| | | | | | | | 3852) | | |
| 375 | E | Q | 0.202480508 | 0.162732896 | 276 | -- | PK | 0.200048174 | 0.079289415 |
| 106 | N | K | 0.202431652 | 0.125127347 | 801 | ---- | LAQY (SEQ | 0.200048174 | 0.196038539 |
| | | | | | | | ID NO: 3540) | | |
| 52 | E | G | 0.202421366 | 0.17180627 | 651 | ----- | PMNLI (SEQ | 0.200048174 | 0.135317157 |
| | | | | | | | ID NO: 3620) | | |
| 597 | W | [stop] | 0.202346989 | 0.135138719 | 756 | - | N | 0.200048174 | 0.172777109 |
| 153 | N | K | 0.202320957 | 0.084739162 | 149 | ------ | KPHTNY | 0.200048174 | 0.109852809 |
| | | | | | | | (SEQ ID NO: | | |
| | | | | | | | 3521) | | |
| 471 | D | E | 0.202309983 | 0.069685161 | 494 | -- | FA | 0.200048174 | 0.123840308 |
| 486 | Y | H | 0.202105792 | 0.189019359 | 181 | V | I | 0.19996686 | 0.166465973 |
| 732 | D | V | 0.202045584 | 0.172766987 | 616 | I | M | 0.19990025 | 0.183539616 |
| 833 | T | I | 0.202003023 | 0.114654955 | 264 | -- | LK | 0.198353725 | 0.107390522 |
| 220 | A | D | 0.201986226 | 0.167650811 | 296 | ---- | VVAQ (SEQ | 0.198353725 | 0.116995821 |
| | | | | | | | ID NO: 3835) | | |
| 386 | D | G | 0.201893421 | 0.144223833 | 152 | T | I | 0.198333224 | 0.117839718 |
| 271 | N | K | 0.201821721 | 0.136225013 | 720 | R | G | 0.198275202 | 0.180739318 |
| 236 | VA | -C | 0.201781577 | 0.118494484 | 236 | V | L | 0.198162379 | 0.091047961 |
| 661 | E | Q | 0.201717523 | 0.126595353 | 903 | R | [stop] | 0.197764314 | 0.184873287 |
| 227 | A | - | 0.199865011 | 0.119483676 | 190 | Q | [stop] | 0.197676182 | 0.135507554 |
| 866 | S | R | 0.199834101 | 0.105100812 | 19 | TK | PG | 0.197606812 | 0.087295898 |
| 664 | ------ | PAVIALT | 0.199723054 | 0.116432821 | 554 | R | [stop] | 0.197270424 | 0.119115645 |
| | | (SEQ ID NO: | | | | | | | |
| | | 3612) | | | | | | | |
| 955 | R | W | 0.199719648 | 0.122422647 | 63 | R | K | 0.197266572 | 0.156106069 |
| 507 | G | A | 0.199700659 | 0.133738835 | 671 | D | Y | 0.197186873 | 0.193857965 |
| 925 | ---- | ALNI (SEQ | 0.199681554 | 0.112069534 | 380 | YL | T[stop] | 0.197159823 | 0.186882164 |
| | | ID NO: 3320) | | | | | | | |
| 419 | --- | EAW | 0.199681554 | 0.151874009 | 210 | P | R | 0.197120998 | 0.088119535 |
| 663 | I | N | 0.199667187 | 0.147345549 | 637 | T | S | 0.196993711 | 0.074085124 |
| 845 | K | R | 0.199649448 | 0.119477749 | 657 | I | M | 0.196919314 | 0.094328263 |
| 782 | L | V | 0.199620025 | 0.156520261 | 458 | -- | AK | 0.196819897 | 0.136384351 |
| 173 | K | E | 0.199587002 | 0.098249426 | 304 | V | F | 0.196773726 | 0.171052025 |
| 615 | ------- | VIEKTLYN | 0.199584873 | 0.182641156 | 263 | N | K | 0.196728929 | 0.082784462 |
| | | (SEQ ID NO: | | | | | | | |
| | | 3780) | | | | | | | |
| 630 | P | A | 0.199530215 | 0.103804567 | 601 | L | V | 0.196677335 | 0.163553469 |
| 446 | AQ | DR | 0.199529716 | 0.10633379 | 545 | I | N | 0.196522854 | 0.15815205 |
| 374 | Q | [stop] | 0.199329379 | 0.131990493 | 571 | VN | AV | 0.196419899 | 0.093569564 |
| 778 | M | K | 0.199291554 | 0.158456568 | 284 | ----- | PHTKE (SEQ | 0.196419899 | 0.146831822 |
| | | | | | | | ID NO: 3618) | | |
| 858 | R | S | 0.199265103 | 0.108121324 | 163 | -HE | PTR | 0.196323235 | 0.180126799 |
| 579 | N | I | 0.19915895 | 0.103520322 | 57 | P | L | 0.196165872 | 0.129483671 |
| 63 | R | G | 0.199095742 | 0.127135026 | 659 | R | P | 0.196165872 | 0.140190097 |
| 646 | S | I | 0.199062518 | 0.104634011 | 784 | A | P | 0.196137855 | 0.183129066 |
| 90 | K | E | 0.199052878 | 0.198240775 | 323 | Q | H | 0.196115938 | 0.150227482 |
| 203 | -- | ES | 0.19897765 | 0.14607778 | 763 | R | W | 0.195967691 | 0.113028792 |
| 439 | E | Q | 0.198907882 | 0.179263601 | 257 | N | Y | 0.195936425 | 0.189617104 |
| 621 | Y | C | 0.198885865 | 0.125823263 | 125 | s | G | 0.19588405 | 0.126337645 |
| 310 | Q | H | 0.198723557 | 0.146313995 | 787 | A | T | 0.195855224 | 0.170500255 |
| 60 | N | K | 0.198659421 | 0.192782927 | 213 | Q | L | 0.195810372 | 0.164285983 |
| 299 | Q | R | 0.1986231 | 0.112149973 | 979 | --- | VSS | 0.195756097 | 0.115771783 |
| 279 | T | s | 0.198506775 | 0.126696973 | 440 | E | Q | 0.192625703 | 0.16228978 |
| 278 | I | N | 0.198457202 | 0.188794837 | 698 | K | N | 0.192440231 | 0.067040488 |
| 462 | -- | FV | 0.198353725 | 0.132924725 | 757 | L | Q | 0.192392703 | 0.11735809 |
| 466 | G | D | 0.195631404 | 0.128114426 | 446 | ---- | AQSK (SEQ | 0.192307738 | 0.188279486 |
| | | | | | | | ID NO: 3329) | | |
| 388 | K | R | 0.195529616 | 0.155892093 | 91 | D | Y | 0.192222499 | 0.161107527 |
| 767 | R | K | 0.195477683 | 0.182282632 | 65 | N | K | 0.192152721 | 0.086051749 |
| 673 | E | V | 0.195473785 | 0.111723182 | 228 | L | Q | 0.192019982 | 0.075226208 |
| 864 | D | Y | 0.195306139 | 0.092331083 | 107 | I | N | 0.191587572 | 0.153969194 |
| 885 | T | K | 0.195258477 | 0.131521124 | 307 | N | S | 0.191540821 | 0.186358955 |
| 856 | Y | C | 0.195214677 | 0.129834532 | 944 | QT | PV | 0.191451442 | 0.133263263 |
| 205 | N | S | 0.194826059 | 0.070507432 | 526 | ------ | LNLYLI (SEQ | 0.191451442 | 0.098341333 |
| | | | | | | | ID NO: 3565) | | |
| 696 | S | R | 0.194740876 | 0.106074027 | 750 | -A | LS | 0.191451442 | 0.07841082 |
| 498 | A | V | 0.194435389 | 0.108630638 | 651 | --- | PMN | 0.191451442 | 0.159749911 |
| 281 | P | H | 0.194325757 | 0.164586878 | 370 | ----- | GYKRQ (SEQ | 0.191451442 | 0.172523736 |
| | | | | | | | ID NO: 3456) | | |
| 106 | N | D | 0.194156411 | 0.113601316 | 654 | L | V | 0.191441378 | 0.100236525 |
| 756 | --- | NLS | 0.194120313 | 0.113317678 | 332 | P | L | 0.191427852 | 0.132400599 |
| 591 | ---- | QGRE (SEQ | 0.194120313 | 0.089464524 | 724 | S | G | 0.191322798 | 0.152424888 |
| | | ID NO: 3635) | | | | | | | |
| 572 | N | D | 0.194049735 | 0.182872987 | 206 | H | D | 0.191266107 | 0.183831734 |
| 762 | G | S | 0.193891502 | 0.138436771 | 594 | E | D | 0.191101272 | 0.114552929 |
| 41 | R | [stop] | 0.193882715 | 0.149226534 | 525 | K | E | 0.190973602 | 0.101119046 |
| 370 | G | D | 0.193873435 | 0.131402011 | 576 | D | E | 0.190942249 | 0.134849057 |
| 58 | I | T | 0.193827338 | 0.18015548 | 663 | I | V | 0.190923863 | 0.098130963 |
| 64 | A | S | 0.193814684 | 0.163559402 | 225 | G | A | 0.190920356 | 0.167486936 |
| 203 | E | G | 0.193809853 | 0.182009134 | 227 | A | V | 0.190541259 | 0.158522801 |
| 318 | E | K | 0.193618764 | 0.182298755 | 539 | ---- | KLRF (SEQ | 0.190525892 | 0.118424918 |
| | | | | | | | ID NO: 3515) | | |
| 867 | V | L | 0.193526313 | 0.149480344 | 336 | ------- | RQANEVD | 0.190525892 | 0.095546149 |
| | | | | | | | (SEQ ID NO: | | |
| | | | | | | | 3676) | | |
| 343 | W | [stop] | 0.193259223 | 0.086409476 | 511 | --- | QYN | 0.190525892 | 0.10542285 |
| 920 | ---- | AAEQ (SEQ | 0.1932196 | 0.09807778 | 182 | -- | TY | 0.190525892 | 0.095282059 |
| | | ID NO: 3298) | | | | | | | |
| 559 | I | N | 0.193172208 | 0.185545361 | 955 | R | K | 0.190477708 | 0.163763612 |
| 577 | D | E | 0.193102893 | 0.104761592 | 936 | ------ | RSQEYK | 0.188141846 | 0.120467426 |
| | | | | | | | (SEQ ID NO: | | |
| | | | | | | | 3686) | | |
| 721 | K | N | 0.193081281 | 0.123219324 | 428 | VE | AV | 0.188141846 | 0.111936388 |
| 767 | R | S | 0.19293341 | 0.180949858 | 419 | ---- | EAWE (SEQ | 0.188141846 | 0.161004571 |
| | | | | | | | ID NO: 3378) | | |
| 353 | L | P | 0.192916533 | 0.142447603 | 148 | ------ | GKPFITN | 0.188141846 | 0.126152225 |
| | | | | | | | (SEQ ID NO: | | |
| | | | | | | | 3437) | | |
| 662 | N | D | 0.192798707 | 0.113762689 | 972 | ------ | VWICPA | 0.188141846 | 0.100559027 |
| | | | | | | | (SEQ ID NO: | | |
| | | | | | | | 3838) | | |
| 87 | E | G | 0.192780117 | 0.1542337 | 328 | F | S | 0.188082476 | 0.152191585 |
| 347 | V | G | 0.192656101 | 0.11936042 | 596 | I | N | 0.188043065 | 0.141822306 |
| 669 | L | V | 0.190343627 | 0.076107876 | 482 | L | V | 0.187880246 | 0.186391629 |
| 492 | K | Q | 0.190290589 | 0.150334427 | 582 | I | V | 0.18725447 | 0.136748728 |
| 721 | K | E | 0.190242607 | 0.123347897 | 699 | E | Q | 0.187137878 | 0.176072109 |
| 389 | K | E | 0.190239723 | 0.177951808 | 758 | S | I | 0.18709104 | 0.158068821 |
| 619 | T | I | 0.190153498 | 0.116807589 | 113 | 1 | N | 0.187005943 | 0.142849404 |
| 93 | V | E | 0.190153374 | 0.163133537 | 968 | K | E | 0.186636923 | 0.128956962 |
| 336 | R | G | 0.190122687 | 0.099072113 | 168 | ----- | LLSPH (SEQ | 0.186576707 | 0.08269231 |
| | | | | | | | ID NO: 3560) | | |
| 878 | N | K | 0.190097445 | 0.16631012 | 833 | TGWM (SEQ | PAG[stop] | 0.186576707 | 0.125195246 |
| | | | | | | ID NO: 3289) | | | |
| 847 | -- | EG | 0.190063819 | 0.165413398 | 272 | ------- | GLAFPK | 0.186576707 | 0.060722091 |
| | | | | | | | (SEQ ID NO: | | |
| | | | | | | | 3442) | | |
| 481 | --- | KLQ | 0.190063819 | 0.144467422 | 529 | ----- | YLIIN (SEQ | 0.186576707 | 0.104569212 |
| | | | | | | | ID NO: 3851) | | |
| 655 | I | N | 0.190024208 | 0.138898845 | 261 | ------- | LANLKD | 0.186576707 | 0.081389931 |
| | | | | | | | (SEQ ID NO: | | |
| | | | | | | | 3539) | | |
| 696 | S- | TG | 0.189908515 | 0.068382259 | 884 | W | [stop] | 0.18656617 | 0.16960295 |
| 55 | P | R | 0.189907461 | 0.115309052 | 719 | S | F | 0.186508523 | 0.176978743 |
| 269 | S | N | 0.18989023 | 0.150359662 | 825 | L | M | 0.185209061 | 0.126954087 |
| 210 | P | L | 0.189875815 | 0.142379934 | 727 | K | M | 0.185134776 | 0.155871835 |
| 798 | S | Y | 0.18982788 | 0.189131471 | 28 | M | K | 0.1848853 | 0.176098567 |
| 258 | E | K | 0.189676636 | 0.183203558 | 404 | H | R | 0.184633168 | 0.163423927 |
| 190 | Q | P | 0.189645523 | 0.168321089 | 394 | A | T | 0.184555363 | 0.1424277 |
| 377 | L | V | 0.189542806 | 0.136436344 | 581 | I | F | 0.184470581 | 0.083013305 |
| 500 | N | S | 0.189535073 | 0.180860478 | 766 | K | M | 0.184394313 | 0.16735316 |
| 295 | N | S | 0.18951855 | 0.108197323 | 547 | P | L | 0.184346525 | 0.155161861 |
| 974 | K | [stop] | 0.189482309 | 0.139647592 | 275 | F | S | 0.184250266 | 0.085183481 |
| 54 | I | V | 0.189429698 | 0.1555694 | 537 | G | V | 0.184185986 | 0.146420736 |
| 736 | N | D | 0.189336313 | 0.075796871 | 873 | S | N | 0.184149692 | 0.143102895 |
| 505 | I | N | 0.189099927 | 0.151637022 | 198 | -I | CL | 0.184139991 | 0.106675461 |
| 396 | Y | H | 0.189044775 | 0.129353397 | 639 | --- | ERR | 0.184139991 | 0.11669463 |
| 117 | D | V | 0.188915066 | 0.132090825 | 287 | -K | CL | 0.184067988 | 0.105370778 |
| 8 | K | M | 0.188755388 | 0.159809948 | 404 | H | N | 0.183958455 | 0.132891407 |
| 699 | E | K | 0.188739566 | 0.092771182 | 710 | ----- | VEQRR (SEQ | 0.183918384 | 0.104439918 |
| | | | | | | | ID NO: 3776) | | |
| 132 | C | G | 0.188700628 | 0.133537793 | 889 | S | P | 0.183788189 | 0.164091129 |
| 338 | A | V | 0.188698117 | 0.151434141 | 144 | V | L | 0.183743996 | 0.065170935 |
| 641 | R | [stop] | 0.188367145 | 0.11062471 | 165 | R | K | 0.183736362 | 0.17610787 |
| 208 | V | L | 0.188333358 | 0.080207667 | 28 | M | V | 0.183560659 | 0.134087452 |
| 207 | P | T | 0.188302368 | 0.15553127 | 611 | A | T | 0.183558778 | 0.136945744 |
| 879 | N | K | 0.186386792 | 0.12079248 | 148 | GK | DR | 0.183483799 | 0.153480995 |
| 712 | Q | L | 0.186379419 | 0.129128012 | 515 | A | C | 0.183483799 | 0.109594032 |
| 583 | L | P | 0.186146799 | 0.156442099 | 367 | N | S | 0.183341948 | 0.159877593 |
| 323 | ---- | QRLK (SEQ | 0.186069265 | 0.110701992 | 868 | E | K | 0.183187044 | 0.163165035 |
| | | ID NO: 3648) | | | | | | | |
| 358 | ---- | KEDG (SEQ | 0.18604741 | 0.119601341 | 306 | L | Q | 0.183120006 | 0.156397405 |
| | | ID NO: 3492) | | | | | | | |
| 835 | -- | WM | 0.18604741 | 0.100790291 | 216 | G | D | 0.183066489 | 0.119789101 |
| 839 | ------- | INGKELK | 0.18604741 | 0.115878922 | 728 | N | Y | 0.183065668 | 0.166304554 |
| | | (SEQ ID NO: | | | | | | | |
| | | 3477) | | | | | | | |
| 463 | V | E | 0.186017541 | 0.06776571 | 879 | N | I | 0.183004606 | 0.128653405 |
| 299 | Q | H | 0.185842115 | 0.085070655 | 126 | G | V | 0.182789208 | 0.179342988 |
| 832 | A | C | 0.185822701 | 0.103905008 | 35 | V | M | 0.182763396 | 0.156289233 |
| 127 | F | Y | 0.185786991 | 0.140080792 | 443 | S | N | 0.182633222 | 0.162446869 |
| 159 | N | S | 0.185693031 | 0.145375399 | 951 | N | D | 0.182629417 | 0.175906154 |
| 532 | -- | IN | 0.185685948 | 0.088889817 | 410 | G | S | 0.182624091 | 0.128840332 |
| 439 | ----- | EERRS (SEQ | 0.185685948 | 0.095520154 | 382 | SS | CL | 0.180218478 | 0.105067529 |
| | | ID NO: 3382) | | | | | | | |
| 152 | -- | TN | 0.185685948 | 0.085877547 | 369 | AG | DS | 0.180218478 | 0.132171137 |
| 684 | --- | LGN | 0.18563709 | 0.122810431 | 757 | LS | PV | 0.180218478 | 0.120148198 |
| 718 | Y | [stop] | 0.185557954 | 0.073476523 | 674 | -------- | GCPLSRFK | 0.180218478 | 0.119094301 |
| | | | | | | | (SEQ ID NO: | | |
| | | | | | | | 3425) | | |
| 585 | L | P | 0.185474446 | 0.130833458 | 418 | -- | DE | 0.180218478 | 0.162709755 |
| 85 | W | R | 0.185353654 | 0.134359698 | 702 | ------- | RTIQAAK | 0.180179308 | 0.102882749 |
| | | | | | | | (SEQ ID NO: | | |
| | | | | | | | 3693) | | |
| 931 | ----- | SWLFL (SEQ | 0.185304071 | 0.113870586 | 81 | L | P | 0.180116381 | 0.137095425 |
| | | ID NO: 3735) | | | | | | | |
| 543 | ---- | KKIK (SEQ | 0.185304071 | 0.066752877 | 939 | --- | EYK | 0.18007812 | 0.13192478 |
| | | ID NO: 3501) | | | | | | | |
| 547 | ------- | PEAFEAN | 0.185304071 | 0.089391329 | 31 | L | Q | 0.180015666 | 0.152602881 |
| | | (SEQ ID NO: | | | | | | | |
| | | 3615) | | | | | | | |
| 91 | D | G | 0.1853036 | 0.092089443 | 213 | ----- | QIGGN (SEQ | 0.179890016 | 0.080439406 |
| | | | | | | | ID NO: 3638) | | |
| 766 | K | R | 0.185284272 | 0.110005204 | 379 | -- | PY | 0.179789203 | 0.118280148 |
| 461 | ----- | SFVIE (SEQ | 0.185264915 | 0.156592075 | 331 | F | Y | 0.179617168 | 0.14637274 |
| | | ID NO: 3698) | | | | | | | |
| 950 | ----- | GNTDK (SEQ | 0.185264915 | 0.154386625 | 540 | L | M | 0.179584486 | 0.167412262 |
| | | ID NO: 3446) | | | | | | | |
| 233 | M | V | 0.182567289 | 0.115088116 | 693 | I | V | 0.179569128 | 0.124539552 |
| 96 | M | L | 0.182378018 | 0.128312349 | 776 | T | S | 0.179453432 | 0.075575874 |
| 753 | ------ | IFANLS (SEQ | 0.182269944 | 0.088037483 | 264 | L | V | 0.179340275 | 0.144429387 |
| | | ID NO: 3472) | | | | | | | |
| 634 | V | A | 0.182243984 | 0.121794563 | 547 | P | R | 0.179333799 | 0.110886672 |
| 556 | Y | S | 0.182208476 | 0.102238152 | 820 | D | E | 0.179273983 | 0.124243775 |
| 972 | ------- | VWKPAV | 0.182135365 | 0.122971859 | 604 | E | K | 0.17907609 | 0.153006263 |
| | | (SEQ ID NO: | | | | | | | |
| | | 3839)[stop] | | | | | | | |
| 716 | G | D | 0.182118038 | 0.088377906 | 651 | P | S | 0.17907294 | 0.16496086 |
| 419 | E | G | 0.182093842 | 0.165354368 | 382 | S | C | 0.179061797 | 0.042397129 |
| 145 | N | K | 0.181832601 | 0.074663212 | 680 | F | Y | 0.179026865 | 0.083849485 |
| 652 | M | R | 0.181725898 | 0.15882275 | 552 | A | V | 0.178983921 | 0.137645246 |
| 183 | Y | [stop] | 0.181723054 | 0.087766244 | 693 | I | F | 0.178916903 | 0.17080226 |
| 229 | S | R | 0.18162155 | 0.118611624 | 151 | HT | LS | 0.178787645 | 0.11267363 |
| 589 | K | E | 0.181594685 | 0.120760487 | 190 | ----- | QRALD (SEQ | 0.178787645 | 0.150480322 |
| | | | | | | | ID NO: 3645) | | |
| 304 | V | I | 0.181591972 | 0.14363826 | 208 | ----- | VKPLE (SEQ | 0.178787645 | 0.112763983 |
| | | | | | | | ID NO: 3783) | | |
| 873 | S | C | 0.181321853 | 0.144241543 | 194 | D | V | 0.178645393 | 0.146182868 |
| 114 | P | S | 0.181260379 | 0.131437002 | 767 | RT | Sc | 0.176164273 | 0.119651092 |
| 100 | A | S | 0.181149523 | 0.170663024 | 678 | S | N | 0.176147348 | 0.146692604 |
| 413 | W | [stop] | 0.181066052 | 0.139390154 | 817 | T | A | 0.176123605 | 0.120992816 |
| 166 | L | M | 0.180963828 | 0.128703075 | 635 | A | G | 0.176061926 | 0.119367224 |
| 496 | ------ | IEAENS (SEQ | 0.180890191 | 0.096196015 | 212 | E | A | 0.175873239 | 0.11085302 |
| | | ID NO: 3468) | | | | | | | |
| 504 | D | V | 0.180843532 | 0.116307526 | 821 | Y | [stop] | 0.175384143 | 0.118184345 |
| 199 | H | Q | 0.180819165 | 0.098967075 | 447 | Q | R | 0.175284629 | 0.123528707 |
| 675 | C | W | 0.180770613 | 0.172891211 | 257 | N | S | 0.175186561 | 0.099304683 |
| 94 | G | S | 0.180639091 | 0.140246364 | 618 | K | R | 0.175178956 | 0.153225543 |
| 212 | E | D | 0.180617877 | 0.126552831 | 217 | N | S | 0.175170771 | 0.153898212 |
| 557 | T | N | 0.180519556 | 0.15369828 | 852 | Y | [stop] | 0.175104531 | 0.090584521 |
| 753 | I | S | 0.180492647 | 0.165598334 | 255 | K | R | 0.175069831 | 0.070668507 |
| 872 | L | V | 0.180432435 | 0.164444609 | 430 | --- | GLS | 0.175035484 | 0.093564105 |
| 596 | ------ | IWNDLL | 0.180218478 | 0.160627748 | 827 | ---- | KLKK (SEQ | 0.175035484 | 0.069987475 |
| | | (SEQ ID NO: | | | | | ID NO: 3510) | | |
| | | 3487) | | | | | | | |
| 163 | H | R | 0.178633884 | 0.108142143 | 796 | --- | YLS | 0.175035484 | 0.092544675 |
| 383 | S | I | 0.178486259 | 0.158810182 | 414 | --------- | GKVYDEAW | 0.175035484 | 0.140128399 |
| | | | | | | | E (SEQ ID | | |
| | | | | | | | NO: 3441) | | |
| 156 | G | D | 0.178426488 | 0.134868493 | 547 | ----- | PEAFE (SEQ | 0.175035484 | 0.118947618 |
| | | | | | | | ID NO: 3614) | | |
| 234 | G | E | 0.178414368 | 0.12320748 | 186 | ------ | GKFGQR | 0.175035484 | 0.092907507 |
| | | | | | | | (SEQ ID NO: | | |
| | | | | | | | 3435) | | |
| 804 | Y | [stop] | 0.178116642 | 0.169884859 | 580 | L | R | 0.174993228 | 0.092760152 |
| 582 | I | N | 0.177915368 | 0.151449157 | 422 | E | K | 0.174900558 | 0.171745203 |
| 655 | I | T | 0.177824888 | 0.131979099 | 285 | H | Y | 0.174862549 | 0.137793142 |
| 129 | C | Y | 0.177764169 | 0.131217004 | 737 | T | I | 0.174757975 | 0.115488534 |
| 20 | K | [stop] | 0.177744686 | 0.162022223 | 455 | W | G | 0.174674459 | 0.156270727 |
| 852 | Y | C | 0.177655192 | 0.126363222 | 401 | L | P | 0.174440338 | 0.064966394 |
| 179 | E | Q | 0.177438027 | 0.163530401 | 953 | - | DKR | 0.174181069 | 0.090682808 |
| 365 | W | S | 0.177330558 | 0.12784352 | 953 | ---- | DKRA (SEQ | 0.174181069 | 0.085814279 |
| | | | | | | | ID NO: 3359) | | |
| 245 | D | E | 0.177288135 | 0.128142583 | 360 | D | N | 0.174161173 | 0.117286104 |
| 593 | R | G | 0.177150053 | 0.165372274 | 520 | K | E | 0.174117735 | 0.143263172 |
| 838 | T | S | 0.177144418 | 0.166381063 | 255 | K | M | 0.171890748 | 0.139268571 |
| 979 | LE[stop]G | VSSR (SEQ | 0.177037198 | 0.160568847 | 675 | -- | CP | 0.171877476 | 0.064917248 |
| | | ID NO: 3834) | | | | | | | |
| 265 | K | E | 0.176890073 | 0.124809095 | 853 | Y | C | 0.171733581 | 0.087723362 |
| 440 | E | D | 0.176868582 | 0.097257257 | 631 | A | V | 0.171731995 | 0.15053602 |
| 107 | I | M | 0.176863119 | 0.14397234 | 668 | A | V | 0.171647872 | 0.129168631 |
| 22 | A | P | 0.176753805 | 0.123959084 | 508 | F | S | 0.17126701 | 0.136692573 |
| 292 | A | G | 0.176665583 | 0.159949136 | 925 | AL | DR | 0.17104041 | 0.083554381 |
| 803 | Q | [stop] | 0.176624558 | 0.101059884 | 437 | -- | LE | 0.17104041 | 0.06885585 |
| 329 | P | S | 0.176586746 | 0.173503743 | 853 | -- | YN | 0.17104041 | 0.123300185 |
| 196 | Y | [stop] | 0.176517802 | 0.122355941 | 797 | ------ | LSKTLA | 0.17104041 | 0.064415402 |
| | | | | | | | (SEQ ID NO: | | |
| | | | | | | | 3574) | | |
| 758 | S | N | 0.176368261 | 0.089480066 | 815 | --- | TIT | 0.17104041 | 0.104377719 |
| 298 | A | T | 0.176357721 | 0.087659893 | 462 | --FV | ERL[stop] | 0.17104041 | 0.089353273 |
| 333 | L | V | 0.176333899 | 0.163860363 | 471 | -- | DK | 0.17104041 | 0.0730883 |
| 518 | W | R | 0.176185261 | 0.104632883 | 418 | ----- | DEAWE (SEQ | 0.170904662 | 0.126366449 |
| | | | | | | | ID NO: 3348) | | |
| 459 | KA | -V | 0.176164273 | 0.103778218 | 213 | --- | QIG | 0.170882441 | 0.117196646 |
| 192 | AL | DR | 0.176164273 | 0.079837153 | 703 | ---- | TIQA (SEQ | 0.170763645 | 0.147647998 |
| | | | | | | | ID NO: 3750) | | |
| 979 | LE----[stop]G | VSSKDLQA | 0.176164273 | 0.074531926 | 356 | E | A | 0.170659559 | 0.127216719 |
| | | (SEQ ID NO: | | | | | | | |
| | | 3810) | | | | | | | |
| 35 | VMT | ETA | 0.176164273 | 0.104758915 | 869 | L | V | 0.170596065 | 0.1158133 |
| 145 | N | D | 0.174107257 | 0.119744646 | 106 | NI | TV | 0.170299453 | 0.164756763 |
| 819 | ---- | ADYD (SEQ | 0.174068679 | 0.17309276 | 160 | V | L | 0.170273865 | 0.111449611 |
| | | ID NO: 3307) | | | | | | | |
| 561 | K | [stop] | 0.174057181 | 0.086009056 | 163 | H | Q | 0.170101095 | 0.104599592 |
| 761 | F | S | 0.17403349 | 0.168753775 | 210 | P | T | 0.170021527 | 0.150133417 |
| 563 | S | P | 0.173902999 | 0.138700996 | 748 | QD | R- | 0.169874659 | 0.074658631 |
| 70 | L | P | 0.173882613 | 0.120818159 | 775 | ------ | YTRMED | 0.169874659 | 0.080414628 |
| | | | | | | | (SEQ ID NO: | | |
| | | | | | | | 3859) | | |
| 24 | K | [stop] | 0.173808747 | 0.113872328 | 513 | N | I | 0.169811112 | 0.150139289 |
| 834 | G | A | 0.173722333 | 0.117168406 | 743 | -- | YY | 0.169783049 | 0.088429509 |
| 167 | I | N | 0.173700086 | 0.14772793 | 467 | ------- | LKEADKD | 0.169783049 | 0.163043441 |
| | | | | | | | (SEQ ID NO: | | |
| | | | | | | | 3556) | | |
| 496 | -------- | IEAENSILD | 0.173653508 | 0.110162475 | 859 | | QNVVK (SEQ | 0.167565632 | 0.122604368 |
| | | (SEQ ID NO: | | | | | ID NO: 3643) | | |
| | | 3470) | | | | | | | |
| 618 | K | [stop] | 0.173508668 | 0.101750483 | 719 | S | P | 0.167206156 | 0.083551442 |
| 297 | V | E | 0.173261294 | 0.132967549 | 712 | Q | R | 0.167205037 | 0.147128575 |
| 426 | K | E | 0.173245682 | 0.081642461 | 964 | F | S | 0.166884399 | 0.138397154 |
| 182 | T | K | 0.173138422 | 0.156579716 | 359 | E | G | 0.16680448 | 0.139659272 |
| 660 | G | S | 0.17299716 | 0.158169348 | 191 | R | K | 0.166577954 | 0.144007057 |
| 805 | T | S | 0.172972548 | 0.12868971 | 339 | N | D | 0.166374831 | 0.157063101 |
| 458 | A | S | 0.172827968 | 0.144714634 | 212 | E | K | 0.166305352 | 0.157035199 |
| 731 | D | V | 0.172739834 | 0.130565896 | 413 | WG | LS | 0.166270685 | 0.125303472 |
| 829 | K | E | 0.172710008 | 0.121812751 | 149 | -- | KP | 0.166270685 | 0.076773688 |
| 859 | Q | [stop] | 0.172627299 | 0.130823394 | 284 | ---- | PHTK (SEQ | 0.166270685 | 0.139854804 |
| | | | | | | | ID NO: 3617) | | |
| 305 | -- | NL | 0.172611068 | 0.12831984 | 146 | D | N | 0.166006779 | 0.113823305 |
| 178 | - | DE | 0.172611068 | 0.108355628 | 686 | N | D | 0.165853975 | 0.141480032 |
| 652 | M | V | 0.172566944 | 0.106266804 | 492 | K | R | 0.16571672 | 0.088451245 |
| 582 | I | M | 0.172413921 | 0.144870464 | 580 | LI | PV | 0.165563978 | 0.079217211 |
| 335 | E | G | 0.172324707 | 0.120749484 | 661 | --- | ENI | 0.165563978 | 0.126675099 |
| 940 | -- | YK | 0.172247171 | 0.104630004 | 829 | K | R | 0.165378823 | 0.103172827 |
| 450 | A | D | 0.172235862 | 0.15659478 | 608 | L | V | 0.165024412 | 0.161094218 |
| 187 | K | T | 0.172165735 | 0.159986695 | 451 | --- | ALT | 0.164823895 | 0.158152194 |
| 289 | GI | AV | 0.172163889 | 0.117287191 | 581 | II | TV | 0.164823895 | 0.074002626 |
| 579 | NL | DR | 0.172163889 | 0.094383078 | 297 | ---- | VAQI (SEQ | 0.164823895 | 0.107420642 |
| | | | | | | | ID NO: 3765) | | |
| 843 | E | G | 0.172115298 | 0.163114025 | 783 | - | T | 0.164823895 | 0.135845679 |
| 259 | K | E | 0.171933606 | 0.128545463 | 496 | I | V | 0.164665656 | 0.140996169 |
| 663 | -I | CL | 0.169783049 | 0.106475808 | 979 | LE[stop]G | VSSE (SEQ | 0.164491714 | 0.145714149 |
| | | | | | | | ID NO: 3795) | | |
| 803 | ------ | QYTSKT | 0.169772888 | 0.094792337 | 932 | ---- | WLFL (SEQ | 0.164491714 | 0.083188044 |
| | | (SEQ ID NO: | | | | | ID NO: 3841) | | |
| | | 3655) | | | | | | | |
| 808 | ------ | TCSNCG | 0.169772888 | 0.089412307 | 637 | ------ | TFERRE | 0.164491714 | 0.152633112 |
| | | (SEQ ID NO: | | | | | (SEQ ID NO: | | |
| | | 3739) | | | | | 3745) | | |
| 845 | K | E | 0.169715078 | 0.127028772 | 325 | --- | LKG | 0.164491714 | 0.125129505 |
| 552 | A | T | 0.169382091 | 0.146396839 | 764 | ------ | QGKRTFM | 0.163440941 | 0.098647738 |
| | | | | | | | (SEQ ID NO: | | |
| | | | | | | | 3634) | | |
| 476 | C | F | 0.169278987 | 0.093974927 | 107 | I | T | 0.163178218 | 0.154967966 |
| 711 | E | D | 0.169174495 | 0.118203075 | 633 | FVAL (SEQ | LWP[stop] | 0.163026367 | 0.076347451 |
| | | | | | | ID NO: 3259) | | | |
| 631 | A | S | 0.169116909 | 0.130583861 | 213 | -- | QI | 0.163026367 | 0.09979216 |
| 303 | W | [stop] | 0.169003266 | 0.078930757 | 186 | ----- | GKFGQ (SEQ | 0.163026367 | 0.114909103 |
| | | | | | | | ID NO: 3434) | | |
| 561 | K | I | 0.168954178 | 0.166308652 | 592 | G | D | 0.162807696 | 0.109433096 |
| 157 | -- | RC | 0.168739459 | 0.094824256 | 257 | N | K | 0.162725471 | 0.091658038 |
| 721 | K | R | 0.168620063 | 0.147491806 | 473 | DE | YH | 0.162404215 | 0.086992333 |
| 614 | R | [stop] | 0.168568195 | 0.15863634 | 975 | P | A | 0.162340126 | 0.074611129 |
| 611 | A | D | 0.168315642 | 0.157590847 | 833 | T | A | 0.162275301 | 0.096163195 |
| 78 | K | [stop] | 0.168282214 | 0.125424128 | 871 | R | S | 0.162178581 | 0.080758991 |
| 917 | ---- | ETHA (SEQ | 0.168207257 | 0.122439321 | 909 | ----- | FVCLN (SEQ | 0.162125073 | 0.14885021 |
| | | ID NO: 3398) | | | | | ID NO: 3421) | | |
| 756 | NL | DR | 0.168207257 | 0.079944251 | 341 | -- | VD | 0.162125073 | 0.111287809 |
| 678 | S | G | 0.168124453 | 0.111226188 | 57 | PI | DS | 0.162125073 | 0.110736083 |
| 525 | K | I | 0.16804127 | 0.142310409 | 83 | VY | AV | 0.162125073 | 0.121259318 |
| 653 | N | K | 0.167953422 | 0.124668308 | 643 | --- | VLD | 0.162125073 | 0.148280778 |
| 37 | T | N | 0.16794635 | 0.137106698 | 561 | K | N | 0.161973573 | 0.145314105 |
| 174 | P | S | 0.167775884 | 0.122107474 | 349 | N | K | 0.161796683 | 0.105713204 |
| 756 | ---- | NLSR (SEQ | 0.167679572 | 0.073550026 | 318 | E | R | 0.161659235 | 0.066441966 |
| | | ID NO: 3594) | | | | | | | |
| 168 | ------ | LLSPHK | 0.167679572 | 0.081935755 | 554 | -- | RF | 0.161611946 | 0.149093192 |
| | | (SEQ ID NO: | | | | | | | |
| | | 3561) | | | | | | | |
| 160 | ------- | VSEHERLI | 0.167679572 | 0.116191677 | 505 | I | F | 0.161489243 | 0.076235653 |
| | | (SEQ ID NO: | | | | | | | |
| | | 3791) | | | | | | | |
| 630 | ---- | PALF (SEQ | 0.164491714 | 0.073996533 | 102 | P | T | 0.161386248 | 0.119400583 |
| | | ID NO: 3610) | | | | | | | |
| 343 | ----- | WWDMV | 0.164491714 | 0.076194534 | 514 | CA | LS | 0.16113532 | 0.083183292 |
| | | (SEQ ID NO: | | | | | | | |
| | | 3846) | | | | | | | |
| 642 | -- | EV | 0.164491714 | 0.162646605 | 979 | ------ | VSSKDLQ | 0.161025471 | 0.108550491 |
| | | | | | | | (SEQ ID NO: | | |
| | | | | | | | 3809) | | |
| 419 | ----- | EAWER (SEQ | 0.164491714 | 0.082157078 | 445 | D | Y | 0.161008394 | 0.118993907 |
| | | ID NO: 3379) | | | | | | | |
| 360 | -- | DG | 0.164491714 | 0.073133393 | 143 | Q | K | 0.160693826 | 0.130109004 |
| 408 | K | E | 0.16446662 | 0.067392631 | 547 | P | S | 0.160635883 | 0.144061844 |
| 48 | R | G | 0.164301321 | 0.157884797 | 29 | K | N | 0.158279304 | 0.142748603 |
| 613 | G | D | 0.164218988 | 0.127296459 | 372 | K | R | 0.158267712 | 0.11920003 |
| 175 | ----- | EANDE (SEQ | 0.164149182 | 0.111610409 | 275 | F | L | 0.158241303 | 0.120299703 |
| | | ID NO: 3377) | | | | | | | |
| 671 | D | E | 0.164120916 | 0.112217289 | 741 | L | P | 0.158158865 | 0.120228264 |
| 794 | ------- | KTYLSKT | 0.16411942 | 0.087804343 | 430 | G | V | 0.158115277 | 0.126566194 |
| | | (SEQ ID NO: | | | | | | | |
| | | 3531) | | | | | | | |
| 599 | ------ | DLLSLE | 0.16411942 | 0.120903184 | 921 | --- | AEQ | 0.158108573 | 0.11103467 |
| | | (SEQ ID NO: | | | | | | | |
| | | 3364) | | | | | | | |
| 58 | I- | LS | 0.16411942 | 0.094001227 | 242 | K | E | 0.158032112 | 0.1512035 |
| 826 | E | D | 0.163807302 | 0.112540279 | 148 | GK | RQ | 0.158026029 | 0.155853601 |
| 889 | S | [stop] | 0.163771981 | 0.149267099 | 295 | -- | NV | 0.157603522 | 0.100157866 |
| 199 | ---H | PRLY (SEQ | 0.163715064 | 0.07899198 | 876 | ---- | SVNN (SEQ | 0.157603522 | 0.131358152 |
| | | ID NO: 3622) | | | | | ID NO: 3732) | | |
| 916 | FET | VQA | 0.163715064 | 0.085074401 | 215 | G | A | 0.157466168 | 0.125711629 |
| 496 | ------- | IEAENSI | 0.163715064 | 0.073631578 | 319 | A | V | 0.15742503 | 0.144655841 |
| | | (SEQ ID NO: | | | | | | | |
| | | 3469) | | | | | | | |
| 164 | ---- | ERLI (SEQ ID | 0.163715064 | 0.124419929 | 222 | G | A | 0.157400391 | 0.107390901 |
| | | NO: 3394) | | | | | | | |
| 345 | D | G | 0.16357556 | 0.12500461 | 523 | V | D | 0.157098281 | 0.069302906 |
| 134 | Q | [stop] | 0.163522049 | 0.142382805 | 753 | ------- | IFANLSR | 0.157085986 | 0.062378414 |
| | | | | | | | (SEQ ID NO: | | |
| | | | | | | | 3473) | | |
| 43 | R | Q | 0.160624353 | 0.132247177 | 177 | N | S | 0.157058654 | 0.117427271 |
| 317 | D | E | 0.160609141 | 0.14140596 | 461 | S | R | 0.157014829 | 0.122688776 |
| 807 | K | [stop] | 0.160484146 | 0.104229856 | 823 | R | T | 0.156977695 | 0.125466793 |
| 572 | N | S | 0.160431799 | 0.062377966 | 427 | K | M | 0.156963925 | 0.118535881 |
| 644 | LD | PV | 0.160242602 | 0.128569608 | 111 | K | [stop] | 0.156885345 | 0.101390983 |
| 699 | EK | DR | 0.160242602 | 0.092172248 | 253 | V | L | 0.156787797 | 0.082680225 |
| 850 | I | V | 0.160226988 | 0.152692033 | 91 | D | V | 0.156758895 | 0.14763673 |
| 100 | AQ | LS | 0.160110772 | 0.101933413 | 71 | T | I | 0.156624998 | 0.127600056 |
| 558 | VI | CL | 0.160110772 | 0.10892714 | 592 | ------ | GREFIW | 0.156575371 | 0.050528735 |
| | | | | | | | (SEQ ID NO: | | |
| | | | | | | | 3450) | | |
| 270 | -- | AN | 0.160110772 | 0.124579798 | 847 | ----- | EGQIT (SEQ | 0.156575371 | 0.108055014 |
| | | | | | | | ID NO: 3386) | | |
| 979 | LE[stop]GS- | VSSKDLQAS | 0.160110772 | 0.049257177 | 111 | KL | S[stop] | 0.156575371 | 0.112953961 |
| | PGIK (SEQ ID | NT (SEQ ID | | | | | | | |
| | NO: | NO: 3816) | | | | | | | |
| | 3279)[stop] | | | | | | | | |
| 484 | K---WYGD | NSSLSASF | 0.160110772 | 0.077521171 | 979 | L-E[stop] | VSSN (SEQ | 0.156575371 | 0.054922359 |
| | (SEQ ID NO: | (SEQ ID NO: | | | | | ID NO: 3829) | | |
| | 3274) | 3602) | | | | | | | |
| 205 | NH | LS | 0.160110772 | 0.08695461 | 717 | G | E | 0.15414714 | 0.124750031 |
| 281 | P | C | 0.160110772 | 0.141761431 | 667 | I | V | 0.154117319 | 0.147646705 |
| 939 | E | R | 0.160110772 | 0.106121188 | 623 | ----- | RRTRQ (SEQ | 0.153993707 | 0.122323206 |
| | | | | | | | ID NO: 3682) | | |
| 672 | - | S | 0.160110772 | 0.105653932 | 773 | R | G | 0.153915262 | 0.146586561 |
| 894 | ------- | SLLKKRFS | 0.160110772 | 0.071577892 | 433 | -- | KH | 0.153881949 | 0.097541884 |
| | | (SEQ ID NO: | | | | | | | |
| | | 3722) | | | | | | | |
| 199 | HV | T[stop] | 0.160110772 | 0.129212095 | 35 | V | G | 0.153666817 | 0.124448628 |
| 47 | L | Q | 0.159718064 | 0.101565653 | 211 | L | V | 0.153538313 | 0.134546484 |
| 262 | A | V | 0.159650297 | 0.156994685 | 26 | G | D | 0.15349539 | 0.149545585 |
| 788 | ------ | YEGLPS | 0.159522485 | 0.129386966 | 279 | ----- | TLPPQ (SEQ | 0.15339361 | 0.125011235 |
| | | (SEQ ID NO: | | | | | ID NO: 3754) | | |
| | | 3848) | | | | | | | |
| 529 | Y | N | 0.159442162 | 0.135286632 | 664 | ------ | PAVIAL | 0.15339361 | 0.13972264 |
| | | | | | | | (SEQ ID NO: | | |
| | | | | | | | 3611) | | |
| 604 | E | V | 0.159292857 | 0.097301034 | 377 | ---- | LLPY (SEQ | 0.15339361 | 0.12480719 |
| | | | | | | | ID NO: 3559) | | |
| 284 | P | S | 0.159001205 | 0.153355474 | 53 | N | D | 0.15332875 | 0.117758231 |
| 750 | A | D | 0.158401706 | 0.125762435 | 140 | K | N | 0.153228737 | 0.097346381 |
| 950 | G | A | 0.158324371 | 0.153957854 | 694 | GE | DR | 0.153190779 | 0.097274205 |
| 688 | T | I | 0.158292674 | 0.119969439 | 741 | ---- | LLYY (SEQ | 0.153190779 | 0.13376095 |
| | | | | | | | ID NO: 3562) | | |
| 203 | ------ | ESNHPV | 0.156575371 | 0.141927058 | 592 | ----- | GREFI (SEQ | 0.153190779 | 0.103123693 |
| | | (SEQ ID NO: | | | | | ID NO: 3449) | | |
| | | 3396) | | | | | | | |
| 230 | DA | LS | 0.156575371 | 0.105363533 | 684 | ------ | LGNPTHI | 0.153147895 | 0.112048537 |
| | | | | | | | (SEQ ID NO: | | |
| | | | | | | | 3550) | | |
| 408 | ----- | KHGED (SEQ | 0.156575371 | 0.140706352 | 532 | --- | INY | 0.153147895 | 0.072663729 |
| | | ID NO: 3497) | | | | | | | |
| 606 | ------- | GSLKLAN | 0.156575371 | 0.154364417 | 311 | K | N | 0.153086255 | 0.08609524 |
| | | (SEQ ID NO: | | | | | | | |
| | | 3454) | | | | | | | |
| 166 | L | Q | 0.156435151 | 0.079474192 | 678 | ----- | SRFKD (SEQ | 0.152422378 | 0.09122337 |
| | | | | | | | ID NO: 3728) | | |
| 213 | Q | H | 0.156012357 | 0.091435578 | 969 | LK | PV | 0.152422378 | 0.0541377 |
| 447 | Q | E | 0.155900092 | 0.095629939 | 419 | EAWERIDKK | RPGRESTRR | 0.152422378 | 0.081179935 |
| | | | | | | V (SEQ ID | W (SEQ ID | | |
| | | | | | | NO: 3256) | NO: 3674) | | |
| 689 | H | P | 0.155877877 | 0.131928361 | 670 | -- | TD | 0.152422378 | 0.096788119 |
| 335 | E | Q | 0.155876225 | 0.110366115 | 383 | --- | SEE | 0.152422378 | 0.066189551 |
| 84 | Y | D | 0.155784728 | 0.135489779 | 880 | --- | DIS | 0.15109455 | 0.085164607 |
| 531 | I | N | 0.155410746 | 0.152604803 | 296 | VV | DR | 0.15109455 | 0.140218943 |
| 103 | A | S | 0.155352263 | 0.149390311 | 293 | YN | DS | 0.15109455 | 0.094395956 |
| 661 | E | V | 0.155230224 | 0.090301063 | 359 | ED | AV | 0.15109455 | 0.062026733 |
| 865 | ------- | LSVELDR | 0.15478543 | 0.145114034 | 210 | PL | RQ | 0.15109455 | 0.109823159 |
| | | (SEQ ID NO: | | | | | | | |
| | | 3579) | | | | | | | |
| 677 | LS | PV | 0.15478543 | 0.108120931 | 758 | S- | TG | 0.15109455 | 0.105413113 |
| 570 | E | G | 0.154599098 | 0.10691093 | 232 | CM | LS | 0.15109455 | 0.096388212 |
| 762 | G | D | 0.154432235 | 0.117428168 | 930 | RSWLFL | EAGCS (SEQ | 0.15109455 | 0.077157167 |
| | | | | | | (SEQ ID NO: | ID NO: | | |
| | | | | | | 3287) | 3376)[stop] | | |
| 177 | N | K | 0.15431964 | 0.1416948 | 886 | KG | C- | 0.15109455 | 0.085064934 |
| 484 | K | N | 0.154291635 | 0.117621744 | 594 | EF | DC | 0.15109455 | 0.055097165 |
| 592 | GRE-- | DNQVG (SEQ | 0.154254957 | 0.077027283 | 140 | K | [stop] | 0.150604639 | 0.124522684 |
| | | ID NO: 3368) | | | | | | | |
| 704 | ----- | IQAAK (SEQ | 0.154254957 | 0.108682368 | 979 | LE[stop]GS- | VSSKDI (SEQ | 0.150527572 | 0.113935287 |
| | | ID NO: 3480) | | | | | ID NO: 3803) | | |
| 285 | ----- | HTKEG (SEQ | 0.154254957 | 0.106587271 | 979 | L-E[stop]G | VSSKA (SEQ | 0.150527572 | 0.106493096 |
| | | ID NO: 3464) | | | | | ID NO: 3798) | | |
| 721 | KY | TV | 0.154254957 | 0.124126134 | 851 | T | A | 0.150513073 | 0.138774627 |
| 650 | ------- | KPMNLIG | 0.154254957 | 0.151047576 | 615 | V | A | 0.150425208 | 0.101961366 |
| | | (SEQ ID NO: | | | | | | | |
| | | 3524) | | | | | | | |
| 403 | ---- | LHLE (SEQ | 0.152422378 | 0.132942463 | 359 | - | E | 0.150399286 | 0.136024193 |
| | | ID NO: 3551) | | | | | | | |
| 389 | KG | TV | 0.152422378 | 0.11037889 | 508 | ------ | FSKQYN | 0.150399286 | 0.049469473 |
| | | | | | | | (SEQ ID NO: | | |
| | | | | | | | 3416) | | |
| 850 | ----- | ITYYN (SEQ | 0.152422378 | 0.102611165 | 202 | R-------- | SSSLASGL | 0.150399286 | 0.07744146 |
| | | ID NO: 3484) | | | | | (SEQ ID NO: | | |
| | | | | | | | 3731)[stop] | | |
| 230 | ------- | DACMGAV | 0.152422378 | 0.082337669 | 884 | ----- | WTKGR | 0.150399286 | 0.084711675 |
| | | (SEQ ID NO: | | | | | (SEQ ID NO: | | |
| | | 3343) | | | | | 3844) | | |
| 461 | ---- | SFVI (SEQ ID | 0.152422378 | 0.085894307 | 399 | ------ | GDLLLH | 0.150399286 | 0.08514719 |
| | | NO: 3697) | | | | | (SEQ ID NO: | | |
| | | | | | | | 3426) | | |
| 673 | E- | DR | 0.152422378 | 0.059554386 | 39 | D | G | 0.150354378 | 0.13986784 |
| 257 | N | D | 0.152411625 | 0.106853984 | 891 | E | V | 0.150263535 | 0.113865674 |
| 590 | R | G | 0.152081011 | 0.117905973 | 450 | A | P | 0.150166455 | 0.146935336 |
| 737 | T | N | 0.151886476 | 0.142783247 | 240 | ---- | LTKY (SEQ | 0.147451251 | 0.080958956 |
| | | | | | | | ID NO: 3581) | | |
| 790 | G | E | 0.151825437 | 0.098317165 | 942 | KY | NC | 0.147451251 | 0.116243971 |
| 831 | T | S | 0.151806143 | 0.14386859 | 47 | LR | C- | 0.147451251 | 0.058888218 |
| 906 | QE | PV | 0.151695593 | 0.100183043 | 807 | KT | -C | 0.147451251 | 0.120603495 |
| 99 | V | D | 0.151565952 | 0.12300149 | 603 | LE | PV | 0.147451251 | 0.066385351 |
| 959 | --- | ETW | 0.151393972 | 0.086210639 | 873 | --- | SEE | 0.147451251 | 0.078348652 |
| 520 | K | R | 0.151365824 | 0.113621271 | 15 | KD | R- | 0.147451251 | 0.123855007 |
| 852 | Y | N | 0.151328449 | 0.137543743 | 206 | HP | DS | 0.147451251 | 0.064383902 |
| 444 | E | G | 0.151257656 | 0.118296919 | 599 | DL | -- | 0.147451251 | 0.079608104 |
| 147 | --- | KGK | 0.15109455 | 0.054833005 | 979 | L-E[stop]GS | VSSKDP | 0.147451251 | 0.049212446 |
| | | | | | | | (SEQ ID NO: | | |
| | | | | | | | 3822) | | |
| 171 | -- | PH | 0.15109455 | 0.08380172 | 979 | LE[stop]GS- | VSSNDLQAS | 0.147451251 | 0.067765787 |
| | | | | | | PGIK (SEQ ID | NK (SEQ ID | | |
| | | | | | | NO: | NO: 3833) | | |
| | | | | | | 3279)[stop] | | | |
| 925 | --- | ALN | 0.15109455 | 0.138412128 | 448 | -- | SK | 0.147451251 | 0.090898875 |
| 539 | ----- | KLRFK (SEQ | 0.15109455 | 0.128926028 | 505 | I- | LS | 0.147451251 | 0.077683234 |
| | | ID NO: 3516) | | | | | | | |
| 334 | ------- | VERQANE | 0.15109455 | 0.059721295 | 398 | FG | SV | 0.147451251 | 0.073631355 |
| | | (SEQ ID NO: | | | | | | | |
| | | 3777) | | | | | | | |
| 484 | KW | TG | 0.15109455 | 0.091510022 | 512 | -Y | DS | 0.147451251 | 0.05128316 |
| 848 | G- | AV | 0.15109455 | 0.104352239 | 345 | ---- | DMVC (SEQ | 0.147451251 | 0.06441585 |
| | | | | | | | ID NO: 3366) | | |
| 236 | ------ | VASFLT | 0.15109455 | 0.088006138 | 177 | ND-- | FTG[stop] | 0.147451251 | 0.085413531 |
| | | (SEQ ID NO: | | | | | | | |
| | | 3767) | | | | | | | |
| 429 | E | D | 0.149933575 | 0.107236607 | 36 | MT | C- | 0.147451251 | 0.118494367 |
| 77 | K | E | 0.148931072 | 0.079170957 | 953 | D- | AV | 0.147451251 | 0.040719542 |
| 259 | ------- | KRLANLKD | 0.148805792 | 0.108390156 | 451 | AL | DR | 0.147451251 | 0.096339405 |
| | | (SEQ ID NO: | | | | | | | |
| | | 3528) | | | | | | | |
| 978 | [stop]L | GI | 0.148805792 | 0.119775179 | 631 | A | C | 0.147319263 | 0.109020371 |
| 386 | D- | AV | 0.148805792 | 0.079572543 | 848 | G | A | 0.147279724 | 0.093306967 |
| 748 | QD | PV | 0.148805792 | 0.094563395 | 239 | F | S | 0.147177048 | 0.142500129 |
| 609 | KL | DR | 0.148805792 | 0.060702366 | 270 | A | T | 0.147117218 | 0.13621963 |
| 699 | EK | DC | 0.148805792 | 0.122863259 | 352 | K | N | 0.147067273 | 0.12109567 |
| 279 | --- | TLP | 0.148805792 | 0.138832536 | 563 | S | T | 0.147049099 | 0.111696976 |
| 24 | K | M | 0.148782741 | 0.14630409 | 612 | N | K | 0.146927237 | 0.108594483 |
| 798 | S | T | 0.148583442 | 0.105674096 | 569 | M | V | 0.146754771 | 0.119310335 |
| 349 | N | S | 0.148310626 | 0.138528822 | 855 | R | G | 0.144425593 | 0.123370913 |
| 403 | -- | LH | 0.148273333 | 0.102736 | 617 | E | V | 0.144206082 | 0.126166622 |
| 967 | ------ | KKLKEVW | 0.148059201 | 0.11964291 | 918 | -------- | THAAEQAA | 0.143857661 | 0.070236443 |
| | | (SEQ ID NO: | | | | | (SEQ ID NO: | | |
| | | 3504) | | | | | 3749) | | |
| 157 | RC | LS | 0.14801524 | 0.133243315 | 733 | ---- | MVRN (SEQ | 0.143791778 | 0.090612696 |
| | | | | | | | ID NO: 3585) | | |
| 493 | PF | TV | 0.14801524 | 0.059147928 | 217 | NS | TG | 0.143791778 | 0.113745581 |
| 188 | ------ | FGQRALD | 0.14801524 | 0.10137508 | 657 | ----- | IARGE (SEQ | 0.143791778 | 0.039293361 |
| | | (SEQ ID NO: | | | | | ID NO: 3466) | | |
| | | 3412) | | | | | | | |
| 898 | KR | TG | 0.14801524 | 0.120213578 | 533 | N | S | 0.14375365 | 0.085993529 |
| 186 | -- | GK | 0.14801524 | 0.114746024 | 185 | ------- | LGKFGQRA | 0.14367777 | 0.094952199 |
| | | | | | | | (SEQ ID NO: | | |
| | | | | | | | 3548) | | |
| 328 | F- | LS | 0.14801524 | 0.071716609 | 616 | ------- | IEKTLYN | 0.14367777 | 0.110151228 |
| | | | | | | | (SEQ ID NO: | | |
| | | | | | | | 3471) | | |
| 204 | ------ | SNHPVKP | 0.14801524 | 0.094645672 | 668 | ------ | ALTDPE | 0.14367777 | 0.113895553 |
| | | (SEQ ID NO: | | | | | (SEQ ID NO: | | |
| | | 3724) | | | | | 3323) | | |
| 314 | -- | IG | 0.14801524 | 0.075655093 | 259 | ---- | KRLA (SEQ | 0.14367777 | 0.070148108 |
| | | | | | | | ID NO: 3527) | | |
| 422 | ER | AV | 0.14801524 | 0.044733928 | 175 | E- | DR | 0.14367777 | 0.049065425 |
| 64 | AN | DS | 0.14801524 | 0.108571015 | 610 | ------ | LANGRV | 0.14367777 | 0.105216814 |
| | | | | | | | (SEQ ID NO: | | |
| | | | | | | | 3537) | | |
| 855 | -- | RY | 0.14801524 | 0.108772293 | 507 | ------- | GFSKQYN | 0.14367777 | 0.101689858 |
| | | | | | | | (SEQ ID NO: | | |
| | | | | | | | 3430) | | |
| 504 | D | E | 0.147876758 | 0.098656217 | 487 | --- | GDL | 0.14367777 | 0.046711447 |
| 342 | D | H | 0.147844774 | 0.140125334 | 731 | DD | CL | 0.14367777 | 0.067816779 |
| 86 | EE | DR | 0.147451251 | 0.143531987 | 265 | KD | R- | 0.14367777 | 0.130304386 |
| 940 | -Y | SV | 0.14673352 | 0.076906931 | 386 | --- | DRK | 0.14367777 | 0.092432212 |
| 794 | KT | NC | 0.14673352 | 0.093083088 | 790 | ----- | GLPSK (SEQ | 0.14367777 | 0.104428158 |
| | | | | | | | ID NO: 3444) | | |
| 487 | ---- | GDLR (SEQ | 0.14673352 | 0.141269601 | 147 | -------- | KGKPHTNY | 0.140217655 | 0.060731949 |
| | | ID NO: 3427) | | | | | (SEQ ID NO: | | |
| | | | | | | | 3496) | | |
| 717 | -- | GY | 0.14673352 | 0.129086357 | 979 | LE[stop]GS- | VSSKDV | 0.140217655 | 0.126849347 |
| | | | | | | | (SEQ ID NO: | | |
| | | | | | | | 3824) | | |
| 468 | ---- | KEAD (SEQ | 0.14673352 | 0.112176586 | 342 | - | D | 0.140217655 | 0.083180031 |
| | | ID NO: 3490) | | | | | | | |
| 102 | P | L | 0.146729077 | 0.094784801 | 701 | ------ | QRTIQA | 0.140217655 | 0.094973524 |
| | | | | | | | (SEQ ID NO: | | |
| | | | | | | | 3650) | | |
| 462 | F | V | 0.146714745 | 0.123539268 | 588 | G | R | 0.140077599 | 0.123307802 |
| 291 | E | Q | 0.146533408 | 0.078647294 | 248 | L | V | 0.139838145 | 0.132091481 |
| 657 | ------ | IDRGEN | 0.146511494 | 0.145489762 | 641 | R | G | 0.139811399 | 0.120984089 |
| | | (SEQ ID NO: | | | | | | | |
| | | 3467) | | | | | | | |
| 32 | L | F | 0.146467882 | 0.099225719 | 375 | E | G | 0.13977585 | 0.117490416 |
| 619 | T | N | 0.146372017 | 0.145146105 | 179 | E | K | 0.139614148 | 0.122113279 |
| 355 | N | K | 0.146341962 | 0.141209887 | 285 | --- | HTK | 0.139514563 | 0.076217964 |
| 132 | C | S | 0.146274101 | 0.131138669 | 166 | -- | LI | 0.139514563 | 0.075733937 |
| 831 | T | A | 0.146217161 | 0.113775751 | 786 | ---- | LAYE (SEQ | 0.139514563 | 0.068877295 |
| | | | | | | | ID NO: 3541) | | |
| 868 | E | V | 0.145780526 | 0.143894902 | 274 | AF | TV | 0.139413376 | 0.092095094 |
| 231 | A | P | 0.14576396 | 0.105172115 | 578 | -- | PN | 0.139413376 | 0.112737023 |
| 944 | ----- | QTNKT (SEQ | 0.14564914 | 0.125394667 | 775 | ----- | YTRME (SEQ | 0.13869596 | 0.096841774 |
| | | ID NO: 3653) | | | | | ID NO: 3858) | | |
| 236 | ----- | VASFL (SEQ | 0.14564914 | 0.09085897 | 838 | TING (SEQ | PSTA (SEQ | 0.13869596 | 0.135948561 |
| | | ID NO: 3766) | | | | ID NO: 3290) | ID NO: 3624) | | |
| 709 | -- | EV | 0.14564914 | 0.119119066 | 75 | E | K | 0.138622423 | 0.112055782 |
| 865 | L | P | 0.145527367 | 0.10928669 | 556 | Y | C | 0.138477684 | 0.131330328 |
| 510 | ---- | KQYN (SEQ | 0.145296444 | 0.112653295 | 98 | R | [stop] | 0.138179687 | 0.102036322 |
| | | ID NO: 3525) | | | | | | | |
| 959 | -- | ET | 0.145296444 | 0.114339851 | 460 | A | T | 0.137813435 | 0.108501414 |
| 414 | G | V | 0.1451247 | 0.140131131 | 111 | K | N | 0.137723187 | 0.11828435 |
| 465 | E | G | 0.144909944 | 0.124547249 | 566 | I | F | 0.137434779 | 0.130961132 |
| 300 | I | T | 0.144877384 | 0.129206612 | 438 | ------ | EEERRS | 0.137192189 | 0.064149715 |
| | | | | | | | (SEQ ID NO: | | |
| | | | | | | | 3380) | | |
| 215 | G | S | 0.144824715 | 0.07809376 | 58 | I | M | 0.13705694 | 0.089110339 |
| 288 | E | G | 0.144744415 | 0.110082872 | 913 | NCGFET | EAAVQA | 0.134611486 | 0.113195929 |
| | | | | | | (SEQ ID NO: | (SEQ ID NO: | | |
| | | | | | | 3282) | 3372) | | |
| 16 | D | N | 0.144678092 | 0.139073977 | 11 | -R | AS | 0.134611486 | 0.123271552 |
| 774 | QY | PV | 0.14367777 | 0.076535556 | 978 | [stop]LE[stop] | YVSSKDLQA | 0.134611486 | 0.087096491 |
| | | | | | | GS-PG (SEQ | (SEQ ID NO: | | |
| | | | | | | ID NO: 3251) | 3864) | | |
| 910 | -- | VC | 0.14367777 | 0.024273265 | 247 | ------ | ILEHQK | 0.134611486 | 0.104206673 |
| | | | | | | | (SEQ ID NO: | | |
| | | | | | | | 3476) | | |
| 484 | KW | DR | 0.14367777 | 0.094175463 | 517 | I | T | 0.134524102 | 0.104605605 |
| 20 | -- | CL | 0.14367777 | 0.08704024 | 18 | N | Y | 0.134422379 | 0.132333464 |
| 847 | -------- | EGQITYYN | 0.14367777 | 0.054370233 | 804 | ---- | YTSK (SEQ | 0.134383084 | 0.102298299 |
| | | (SEQ ID NO: | | | | | ID NO: 3860) | | |
| | | 3389) | | | | | | | |
| 114 | P | L | 0.143623976 | 0.107371623 | 872 | ------- | LSEESVN | 0.134383084 | 0.104954479 |
| | | | | | | | (SEQ ID NO: | | |
| | | | | | | | 3573) | | |
| 294 | N | S | 0.143486731 | 0.084830242 | 743 | Y | H | 0.134286698 | 0.08203884 |
| 473 | D | G | 0.143465301 | 0.122194432 | 250 | H | Q | 0.134238241 | 0.111012466 |
| 376 | A | T | 0.1434567 | 0.101440197 | 268 | A | P | 0.134027791 | 0.098451313 |
| 637 | T | A | 0.143296115 | 0.114711319 | 978 | [stop]LE[stop] | YVSSKDLQ | 0.134010909 | 0.133274253 |
| | | | | | | GSPG (SEQ | (SEQ ID NO: | | |
| | | | | | | ID NO: 3251) | 3863) | | |
| 365 | W | C | 0.143131818 | 0.093254266 | 664 | -- | PA | 0.134010909 | 0.124393367 |
| 559 | I | S | 0.142993499 | 0.107801059 | 979 | LE[stop]G- | VSSND (SEQ | 0.133919467 | 0.126494561 |
| | | | | | | | ID NO: 3830) | | |
| 671 | D | S | 0.142731931 | 0.123439168 | 241 | T | N | 0.133870518 | 0.110803484 |
| 487 | ----- | GDLRGK | 0.14265438 | 0.086040474 | 153 | N | S | 0.133623126 | 0.12555263 |
| | | (SEQ ID NO: | | | | | | | |
| | | 3428) | | | | | | | |
| 211 | LEQIG (SEQ | RNRSA (SEQ | 0.14265438 | 0.100691421 | 196 | Y | H | 0.133619017 | 0.107174466 |
| | ID NO: 3280) | ID NO: 3670) | | | | | | | |
| 26 | GP | CL | 0.14265438 | 0.067388407 | 744 | Y- | LS | 0.133358224 | 0.114892564 |
| 421 | -- | WE | 0.14265438 | 0.084239003 | 633 | F | S | 0.133277029 | 0.122435158 |
| 211 | ---- | LEQI (SEQ ID | 0.14265438 | 0.118588014 | 619 | T | S | 0.133139525 | 0.08963831 |
| | | NO: 3543) | | | | | | | |
| 767 | R | [stop] | 0.141592128 | 0.123403074 | 742 | L | P | 0.133131448 | 0.09127341 |
| 290 | I | N | 0.141531787 | 0.136370873 | 809 | C | [stop] | 0.133028515 | 0.072072201 |
| 774 | Q | [stop] | 0.141517184 | 0.125118121 | 86 | E | D | 0.132733699 | 0.128073996 |
| 341 | V | E | 0.14127686 | 0.094518287 | 473 | D | V | 0.132562245 | 0.055193421 |
| 176 | A | S | 0.140653486 | 0.112098857 | 568 | -- | PM | 0.130626359 | 0.119168349 |
| 562 | K | N | 0.140512419 | 0.126501373 | 362 | K | R | 0.130604026 | 0.105840846 |
| 317 | D | H | 0.140493859 | 0.124148887 | 359 | E | V | 0.130475561 | 0.064946527 |
| 941 | ------ | KKYQTN | 0.140217655 | 0.077001548 | 426 | ---- | KKVE (SEQ | 0.130424348 | 0.109290243 |
| | | (SEQ ID NO: | | | | | ID NO: 3506) | | |
| | | 3508) | | | | | | | |
| 826 | E | K | 0.136937076 | 0.066669616 | 300 | IV | DR | 0.130424348 | 0.08495594 |
| 955 | R | T | 0.136388186 | 0.086919652 | 893 | -- | LS | 0.130424348 | 0.106896252 |
| 400 | ----- | DLLLH (SEQ | 0.136321349 | 0.064628042 | 256 | KN | TV | 0.130424348 | 0.057621352 |
| | | ID NO: 3361) | | | | | | | |
| 163 | -------- | HERLILL | 0.136321349 | 0.117792482 | 767 | ---- | RTFM (SEQ | 0.130424348 | 0.06446722 |
| | | (SEQ ID NO: | | | | | ID NO: 3691) | | |
| | | 3460) | | | | | | | |
| 950 | - | G | 0.136321349 | 0.089773613 | 324 | R | G | 0.13036573 | 0.130162815 |
| 353 | ------- | LINEKKE | 0.136321349 | 0.11384298 | 460 | A | P | 0.129809906 | 0.111386576 |
| | | (SEQ ID NO: | | | | | | | |
| | | 3554) | | | | | | | |
| 469 | -------- | EADKDEFC | 0.136321349 | 0.136235916 | 744 | Y | S | 0.129801283 | 0.120155085 |
| | | (SEQ ID NO: | | | | | | | |
| | | 3373) | | | | | | | |
| 298 | ------ | AQIVIW | 0.136321349 | 0.124259801 | 297 | V | L | 0.1296923 | 0.098130283 |
| | | (SEQ ID NO: | | | | | | | |
| | | 3328) | | | | | | | |
| 967 | --- | KKL | 0.136321349 | 0.087024226 | 979 | LE | VP | 0.129554025 | 0.068280994 |
| 834 | G | D | 0.136317736 | 0.131556677 | 595 | ------- | FIWNDLL | 0.129554025 | 0.083916268 |
| | | | | | | | (SEQ ID NO: | | |
| | | | | | | | 3414) | | |
| 675 | C | S | 0.135933989 | 0.124817499 | 909 | F | C | 0.129452838 | 0.12013501 |
| 295 | N | D | 0.135903192 | 0.116385268 | 39 | D | N | 0.128914064 | 0.121593627 |
| 489 | L | P | 0.135710175 | 0.113005835 | 263 | N | D | 0.128846416 | 0.111193487 |
| 316 | R | W | 0.135665116 | 0.08159144 | 403 | ------- | LHLEKKH | 0.128586666 | 0.071668629 |
| | | | | | | | (SEQ ID NO: | | |
| | | | | | | | 3553) | | |
| 782 | L | P | 0.135444097 | 0.094158481 | 979 | LE[stop]GS-G | VSSKDLV | 0.128586666 | 0.121567211 |
| | | | | | | | (SEQ ID NO: | | |
| | | | | | | | 3821) | | |
| 252 | K | I | 0.135215444 | 0.118419704 | 876 | ------ | SVNNDI | 0.128586666 | 0.054233667 |
| | | | | | | | (SEQ ID NO: | | |
| | | | | | | | 3733) | | |
| 703 | -- | TI | 0.135116856 | 0.093813019 | 228 | ------ | LSDACMG | 0.128586666 | 0.126842965 |
| | | | | | | | (SEQ ID NO: | | |
| | | | | | | | 3571) | | |
| 671 | --- | DPE | 0.135116856 | 0.117221994 | 701 | ---- | QRTI (SEQ ID | 0.128586666 | 0.098093616 |
| | | | | | | | NO: 3649) | | |
| 763 | R | Q | 0.135073853 | 0.130952104 | 549 | ------- | AFEANRFY | 0.127406426 | 0.084837264 |
| | | | | | | | (SEQ ID NO: | | |
| | | | | | | | 3310) | | |
| 815 | T | S | 0.135026549 | 0.096980291 | 979 | LE[stop]GSPG | VSSKDLQE | 0.127187739 | 0.092227907 |
| | | | | | | I (SEQ ID NO: | (SEQ ID NO: | | |
| | | | | | | 3278) | 3817) | | |
| 141 | L | M | 0.134960075 | 0.098794232 | 445 | D | E | 0.127007554 | 0.122060316 |
| 789 | E | K | 0.134893603 | 0.120008321 | 82 | H | N | 0.126805938 | 0.104486705 |
| 36 | M | L | 0.13488937 | 0.122340012 | 676 | P | L | 0.126754121 | 0.080812602 |
| 278 | I | F | 0.134789571 | 0.111040576 | 951 | ---- | NTDK (SEQ | 0.126641231 | 0.099218396 |
| | | | | | | | ID NO: 3604) | | |
| 358 | K | I | 0.132508402 | 0.120198091 | 979 | LE[stop]GS- | VSSKDLQAS | 0.126641231 | 0.095848514 |
| | | | | | | PGIK (SEQ ID | NN (SEQ ID | | |
| | | | | | | NO: | NO: 3815) | | |
| | | | | | | 3279)[stop] | | | |
| 476 | - | C | 0.132326289 | 0.087739647 | 204 | ---- | SNHP (SEQ | 0.126641231 | 0.07625836 |
| | | | | | | | ID NO: 3723) | | |
| 953 | DK | E- | 0.132326289 | 0.066036843 | 426 | KK | DR | 0.126641231 | 0.097925475 |
| 770 | ------ | MAERQY | 0.132326289 | 0.083381966 | 923 | QAA | PV- | 0.126641231 | 0.093158654 |
| | | (SEQ ID NO: | | | | | | | |
| | | 3584) | | | | | | | |
| 887 | ------- | GRSGEAL | 0.132326289 | 0.072961347 | 101 | QP | ET | 0.126641231 | 0.062121806 |
| | | (SEQ ID NO: | | | | | | | |
| | | 3453) | | | | | | | |
| 630 | P | S | 0.132221835 | 0.08064538 | 942 | K-Y | NCL | 0.126641231 | 0.088910569 |
| 290 | I | T | 0.132066117 | 0.101441805 | 826 | EK | AV | 0.126641231 | 0.091897908 |
| 81 | L | Q | 0.132063026 | 0.114766305 | 292 | ----- | AYNNV (SEQ | 0.126641231 | 0.106376872 |
| | | | | | | | ID NO: 3338) | | |
| 809 | C | F | 0.131888449 | 0.093326725 | 879 | ------ | NDISSWT | 0.126641231 | 0.078787272 |
| | | | | | | | (SEQ ID NO: | | |
| | | | | | | | 3590) | | |
| 497 | ------ | EAENSIL | 0.131863052 | 0.100142921 | 181 | VTYSLGKFG | - | 0.126641231 | 0.089695218 |
| | | (SEQ ID NO: | | | | Q (SEQ ID | SHTAWASSD | | |
| | | 3374) | | | | NO: 3296) | (SEQ ID NO: | | |
| | | | | | | | 3709) | | |
| 717 | ----- | GYSRK (SEQ | 0.131863052 | 0.112950153 | 137 | YV | DR | 0.126641231 | 0.109693213 |
| | | ID NO: 3458) | | | | | | | |
| 386 | ---- | DRKK (SEQ | 0.131863052 | 0.08146183 | 548 | ---- | EAFE (SEQ | 0.126641231 | 0.095888318 |
| | | ID NO: 3369) | | | | | ID NO: 3375) | | |
| 68 | KL | TV | 0.131863052 | 0.070945883 | 670 | ------ | TDPEGCP | 0.12652671 | 0.087582312 |
| | | | | | | | (SEQ ID NO: | | |
| | | | | | | | 3743) | | |
| 700 | KQ | DR | 0.131863052 | 0.063471315 | 344 | -- | WD | 0.12652671 | 0.059784458 |
| 831 | TAT | PPP | 0.131863052 | 0.067816715 | 589 | K | [stop] | 0.126002643 | 0.117169902 |
| 157 | ----- | RCNVS (SEQ | 0.131863052 | 0.080937513 | 670 | T | I | 0.125333365 | 0.115123087 |
| | | ID NO: 3659) | | | | | | | |
| 953 | ------ | DKRAFV | 0.131771442 | 0.07848717 | 843 | E | K | 0.125307936 | 0.1170313 |
| | | (SEQ ID NO: | | | | | | | |
| | | 3360) | | | | | | | |
| 978 | [stop]L | GF | 0.131771442 | 0.061548024 | 209 | --- | KPL | 0.125145098 | 0.058688797 |
| 979 | LE[stop]G | VSCK (SEQ | 0.131568591 | 0.101292375 | 256 | ----- | KNEKR (SEQ | 0.125145098 | 0.118773295 |
| | | ID NO: 3788) | | | | | ID NO: 3517) | | |
| 855 | R | S | 0.131540317 | 0.054730727 | 627 | ------- | QDEPALF | 0.125145098 | 0.11944079 |
| | | | | | | | (SEQ ID NO: | | |
| | | | | | | | 3633) | | |
| 128 | A | T | 0.13150991 | 0.131075942 | 637 | TF | S- | 0.125145098 | 0.075022945 |
| 225 | G | R | 0.131348437 | 0.12857841 | 846 | ------ | VEGQIT | 0.125145098 | 0.095200634 |
| | | | | | | | (SEQ ID NO: | | |
| | | | | | | | 3774) | | |
| 874 | E | D | 0.131154993 | 0.12741404 | 112 | LI | PV | 0.125145098 | 0.061303825 |
| 54 | I | T | 0.130796445 | 0.072189843 | 592 | GRE- | DNQV (SEQ | 0.125145098 | 0.061215515 |
| | | | | | | | ID NO: 3367) | | |
| 797 | -------- | LSKTLAQYT | 0.128586666 | 0.060991971 | 273 | ------- | LAFPKIT | 0.125145098 | 0.062360109 |
| | | (SEQ ID NO: | | | | | (SEQ ID NO: | | |
| | | 3575) | | | | | 3535) | | |
| 14 | VK | AG | 0.128586666 | 0.085310723 | 773 | ---- | RQYT (SEQ | 0.125145098 | 0.098790624 |
| | | | | | | | ID NO: 3680) | | |
| 423 | RI | LS | 0.128586666 | 0.084850033 | 274 | AF | DS | 0.125145098 | 0.089301627 |
| 583 | -- | LP | 0.128586666 | 0.051620503 | 686 | N- | TV | 0.125145098 | 0.106327975 |
| 979 | LE[stop]GS- | VSSNDLQAS | 0.128586666 | 0.102476858 | 549 | - | A | 0.125145098 | 0.111251903 |
| | PGIK (SEQ ID | N (SEQ ID | | | | | | | |
| | NO: 3279) | NO: 3832) | | | | | | | |
| 979 | LE[stop]GS- | FSSKDLQAS | 0.128586666 | 0.093654912 | 615 | --- | VIE | 0.125145098 | 0.115519537 |
| | PGIK (SEQ ID | NK (SEQ ID | | | | | | | |
| | NO: | NO: 3420) | | | | | | | |
| | 3279)[stop] | | | | | | | | |
| 533 | -- | NY | 0.128586666 | 0.127517343 | 486 | Y | [stop] | 0.12498861 | 0.117668911 |
| 563 | ---- | SGEI (SEQ ID | 0.128586666 | 0.112169649 | 479 | E | G | 0.124803485 | 0.119823525 |
| | | NO: 3702) | | | | | | | |
| 979 | L-E[stop]GS | VSSKDH | 0.128586666 | 0.096285329 | 225 | G | E | 0.124549307 | 0.110077498 |
| | | (SEQ ID NO: | | | | | | | |
| | | 3802) | | | | | | | |
| 755 | ---- | ANLS (SEQ | 0.12851771 | 0.091942401 | 123 | T | N | 0.123826195 | 0.091669684 |
| | | ID NO: 3326) | | | | | | | |
| 461 | S | N | 0.128271168 | 0.11452282 | 436 | K | E | 0.123328926 | 0.10928445 |
| 864 | D | E | 0.128210448 | 0.108842691 | 139 | Y | [stop] | 0.123256307 | 0.11429924 |
| 84 | Y | C | 0.128022871 | 0.110536014 | 669 | - | L | 0.119637812 | 0.05675251 |
| 720 | ---- | RKYA (SEQ | 0.127406426 | 0.102905352 | 845 | ------ | KVEGQI | 0.119637812 | 0.06612892 |
| | | ID NO: 3669) | | | | | (SEQ ID NO: | | |
| | | | | | | | 3532) | | |
| 416 | VYDEAWE | CTMRPG | 0.127406426 | 0.059900059 | 400 | ------ | DLLLHL | 0.119637812 | 0.07276695 |
| | (SEQ ID NO: | (SEQ ID NO: | | | | | (SEQ ID NO: | | |
| | 3297) | 3340)- | | | | | 3362) | | |
| 808 | ---- | TCSN (SEQ | 0.127406426 | 0.082184056 | 757 | L | R | 0.119502434 | 0.108713549 |
| | | ID NO: 3738) | | | | | | | |
| 791 | ------ | LPSKTY | 0.127406426 | 0.108127962 | 578 | P | L | 0.119430629 | 0.116829607 |
| | | (SEQ ID NO: | | | | | | | |
| | | 3568) | | | | | | | |
| 162 | ------ | EHERLI (SEQ | 0.127406426 | 0.099109571 | 634 | VA | LS | 0.119372647 | 0.100712827 |
| | | ID NO: 3390) | | | | | | | |
| 858 | ------ | RQNVVKDL | 0.126641231 | 0.065591267 | 510 | K-- | SHL | 0.119372647 | 0.080479619 |
| | | (SEQ ID NO: | | | | | | | |
| | | 3679) | | | | | | | |
| 231 | A | C | 0.126641231 | 0.070173983 | 979 | LE[stop]G | ASSK (SEQ | 0.119372647 | 0.074447954 |
| | | | | | | | ID NO: 3332) | | |
| 898 | KRF | NCL | 0.126641231 | 0.049641927 | 798 | -S | TA | 0.119372647 | 0.036802807 |
| 789 | EG | AV | 0.126641231 | 0.10544887 | 653 | NL | DR | 0.119372647 | 0.061028998 |
| 640 | RR | TG | 0.126641231 | 0.104632778 | 854 | -N | LS | 0.119372647 | 0.074161693 |
| 303 | ----- | WVNLN | 0.126641231 | 0.064376538 | 420 | A | S | 0.119261972 | 0.115184751 |
| | | (SEQ ID NO: | | | | | | | |
| | | 3845) | | | | | | | |
| 640 | R- | TV | 0.126641231 | 0.051697037 | 519 | --- | QKD | 0.119051026 | 0.108753459 |
| 890 | GE | DR | 0.126641231 | 0.058497447 | 600 | LLS | PV- | 0.119011185 | 0.056536344 |
| 513 | ------- | NCAFIWQK | 0.126641231 | 0.110534935 | 271 | ------- | NGLAFPK | 0.119011185 | 0.073725244 |
| | | (SEQ ID NO: | | | | | (SEQ ID NO: | | |
| | | 3589) | | | | | 3592) | | |
| 36 | MT | TV | 0.126641231 | 0.096682191 | 51 | P | L | 0.118978183 | 0.099712186 |
| 979 | -- | AV | 0.126641231 | 0.031136061 | 403 | ----- | LHLEK (SEQ | 0.118963684 | 0.11518549 |
| | | | | | | | ID NO: 3552) | | |
| 607 | --- | SLK | 0.126641231 | 0.117782054 | 457 | ----- | RAKAS (SEQ | 0.118963684 | 0.088377062 |
| | | | | | | | ID NO: 3656) | | |
| 979 | LE[stop]G | FSSK (SEQ | 0.126627253 | 0.064240928 | 776 | ---- | TRME (SEQ | 0.118963684 | 0.083809802 |
| | | ID NO: 3418) | | | | | ID NO: 3759) | | |
| 29 | KT | LS | 0.126627253 | 0.070400509 | 320 | KPLQRL | SHCRD (SEQ | 0.118677331 | 0.073630679 |
| | | | | | | (SEQ ID NO: | ID NO: | | |
| | | | | | | 3270) | 3704)[stop] | | |
| 510 | KQ-Y | SHLQ (SEQ | 0.126602218 | 0.092982894 | 685 | GNPT (SEQ | ATLH (SEQ | 0.118677331 | 0.086334956 |
| | | ID NO: 3705) | | | | ID NO: 3263) | ID NO: 3334) | | |
| 960 | --- | TWQ | 0.12652671 | 0.053263565 | 178 | ---- | DELV (SEQ | 0.118677331 | 0.101525884 |
| | | | | | | | ID NO: 3352) | | |
| 665 | --- | AVI | 0.12652671 | 0.057438099 | 160 | ----- | VSEHE (SEQ | 0.113504256 | 0.099167463 |
| | | | | | | | ID NO: 3789) | | |
| 675 | - | C | 0.12652671 | 0.103567494 | 745 | ----- | AVTQD (SEQ | 0.113504256 | 0.111375922 |
| | | | | | | | ID NO: 3336) | | |
| 451 | ------- | ALTDWLR | 0.12652671 | 0.081452296 | 570 | E | K | 0.1130503 | 0.100973674 |
| | | (SEQ ID NO: | | | | | | | |
| | | 3324) | | | | | | | |
| 805 | ----- | TSKTC (SEQ | 0.12652671 | 0.07786947 | 368 | L | P | 0.111983406 | 0.095724154 |
| | | ID NO: 3760) | | | | | | | |
| 890 | GE | VAKPLLQQ | 0.12652671 | 0.093632788 | 275 | F | Y | 0.111191948 | 0.100665217 |
| | | (SEQ ID NO: | | | | | | | |
| | | 3764) | | | | | | | |
| 885 | -- | TK | 0.12652671 | 0.12280066 | 521 | D | E | 0.111133748 | 0.10058089 |
| 831 | T | N | 0.123113024 | 0.105004336 | 562 | K | E | 0.110566391 | 0.097349138 |
| 147 | ------ | KGKPHTN | 0.123112897 | 0.091739528 | 136 | L | Q | 0.110244812 | 0.107286129 |
| | | (SEQ ID NO: | | | | | | | |
| | | 3495) | | | | | | | |
| 256 | --- | KNE | 0.122844147 | 0.106923843 | 411 | E | G | 0.110174632 | 0.097582202 |
| 179 | EL | A- | 0.122844147 | 0.091584443 | 381 | LS | PV | 0.110164473 | 0.095898615 |
| 406 | ----- | EKKHG (SEQ | 0.122844147 | 0.089153499 | 616 | I | V | 0.109853606 | 0.094001833 |
| | | ID NO: 3392) | | | | | | | |
| 295 | ------ | NVVAQ (SEQ | 0.122844147 | 0.103819809 | 843 | E | R | 0.109803145 | 0.097494217 |
| | | ID NO: 3607) | | | | | | | |
| 658 | D | E | 0.122389699 | 0.080353294 | 676 | P | H | 0.109607681 | 0.091744681 |
| 206 | H | Q | 0.122384978 | 0.08971464 | 484 | KWYG (SEQ | NSSL (SEQ | 0.109535927 | 0.106819917 |
| | | | | | | ID NO: 3273) | ID NO: 3600) | | |
| 689 | H | Q | 0.122256431 | 0.089420446 | 511 | QY | PV | 0.109451554 | 0.106726398 |
| 306 | LN | PV | 0.121921649 | 0.07283705 | 979 | LE[stop]GSP | VSSKDV | 0.108902792 | 0.077647274 |
| | | | | | | | (SEQ ID NO: | | |
| | | | | | | | 3824) | | |
| 620 | LY | PV | 0.121921649 | 0.084823364 | 420 | A | V | 0.108649806 | 0.097722159 |
| 910 | -- | SG | 0.121685511 | 0.114110877 | 53 | N | K | 0.108567111 | 0.086753227 |
| 508 | -------- | FSKQYNCA | 0.121235544 | 0.060533533 | 114 | P | A | 0.108538006 | 0.106859466 |
| | | (SEQ ID NO: | | | | | | | |
| | | 3417) | | | | | | | |
| 314 | I | F | 0.120726616 | 0.074980055 | 637 | ------- | TFERREV | 0.108360722 | 0.063051456 |
| | | | | | | | (SEQ ID NO: | | |
| | | | | | | | 3746) | | |
| 746 | VT | C- | 0.120516649 | 0.087097894 | 286 | TK | DR | 0.108360722 | 0.053025872 |
| 910 | VC | CL | 0.119637812 | 0.085877084 | 249 | EH | AV | 0.108360722 | 0.095653705 |
| 621 | ------ | YNRRTR | 0.119637812 | 0.065553526 | 67 | NK | DR | 0.108360722 | 0.039884349 |
| | | (SEQ ID NO: | | | | | | | |
| | | 3853) | | | | | | | |
| 467 | ------ | LKEAD (SEQ | 0.119637812 | 0.109940477 | 944 | ------- | QTNKTTG | 0.108360722 | 0.078648908 |
| | | ID NO: 3555) | | | | | (SEQ ID NO: | | |
| | | | | | | | 3654) | | |
| 827 | - | KL | 0.119637812 | 0.054530509 | 513 | ------ | NCAFIW | 0.108360722 | 0.045078115 |
| | | | | | | | (SEQ ID NO: | | |
| | | | | | | | 3588) | | |
| 374 | --- | QEA | 0.119637812 | 0.063378708 | 429 | ---- | EGLS (SEQ | 0.108360722 | 0.046808088 |
| | | | | | | | ID NO: 3384) | | |
| 145 | --- | NDK | 0.119637812 | 0.051846935 | 615 | VI | AV | 0.108360722 | 0.089957198 |
| 979 | LE[stop]GSPG | FSSKDLQ | 0.119637812 | 0.067517262 | 927 | ---- | NIAR (SEQ | 0.108360722 | 0.096224338 |
| | (SEQ ID NO: | (SEQ ID NO: | | | | | ID NO: 3593) | | |
| | 3251) | 3419) | | | | | | | |
| 338 | --- | ANE | 0.119637812 | 0.103007188 | 56 | Q | V | 0.108360722 | 0.076115958 |
| 389 | KG | R- | 0.119637812 | 0.050940425 | 852 | YY | C- | 0.108360722 | 0.054744482 |
| 587 | ------ | FGKRQG | 0.118677331 | 0.110043529 | 816 | IT | LS | 0.108360722 | 0.074232993 |
| | | (SEQ ID NO: | | | | | | | |
| | | 3411) | | | | | | | |
| 783 | ------ | TAKLAY | 0.118677331 | 0.076704941 | 210 | P | S | 0.108088041 | 0.085752595 |
| | | (SEQ ID NO: | | | | | | | |
| | | 3736) | | | | | | | |
| 542 | -- | FK | 0.118677331 | 0.098685141 | 251 | --- | QKV | 0.107840626 | 0.092439 |
| 733 | ------ | MVRNTAR | 0.118677331 | 0.078476963 | 351 | ---- | KKLI (SEQ | 0.107840626 | 0.05939446 |
| | | (SEQ ID NO: | | | | | ID NO: 3502) | | |
| | | 3586) | | | | | | | |
| 396 | ---- | YQFG (SEQ | 0.118677331 | 0.08225792 | 962 | ------ | QSFYRKK | 0.107840626 | 0.060903469 |
| | | ID NO: 3855) | | | | | (SEQ ID NO: | | |
| | | | | | | | 3651) | | |
| 837 | ----- | TTING (SEQ | 0.118677331 | 0.059978646 | 594 | EFI | DCL | 0.107840626 | 0.078577001 |
| | | ID NO: 3762) | | | | | | | |
| 729 | L | P | 0.118360335 | 0.091091038 | 600 | --- | LLS | 0.107840626 | 0.107212137 |
| 194 | D | E | 0.117679069 | 0.090466918 | 979 | LE[stop]GS- | ASSKDLQAS | 0.107840626 | 0.073484536 |
| | | | | | | PGIK (SEQ ID | N (SEQ ID | | |
| | | | | | | NO: 3279) | NO: 3333) | | |
| 582 | ILP | SC- | 0.11732562 | 0.090313521 | 606 | --- | GSL | 0.107840626 | 0.104907627 |
| 901 | --- | SHR | 0.11712133 | 0.108439325 | 604 | --- | ETG | 0.107840626 | 0.105428162 |
| 67 | N | D | 0.116939695 | 0.113264127 | 473 | ------- | DEFCRCE | 0.107840626 | 0.072973962 |
| | | | | | | | (SEQ ID NO: | | |
| | | | | | | | 3351) | | |
| 309 | W | R | 0.116671977 | 0.111491729 | 798 | ------ | SKTLAQ | 0.107840626 | 0.085530107 |
| | | | | | | | (SEQ ID NO: | | |
| | | | | | | | 3713) | | |
| 74 | T | S | 0.11653877 | 0.0855649 | 607 | ----- | SLKLA (SEQ | 0.107840626 | 0.087611083 |
| | | | | | | | ID NO: 3178) | | |
| 838 | T | N | 0.116394614 | 0.094955966 | 705 | Q- | ET | 0.107840626 | 0.102652999 |
| 137 | Y | [stop] | 0.116334699 | 0.088258455 | 215 | GG | CL | 0.105199237 | 0.057087854 |
| 591 | Q | [stop] | 0.116290785 | 0.093561727 | 886 | KG | TV | 0.105199237 | 0.077099458 |
| 686 | N | K | 0.116232458 | 0.062605741 | 198 | -I | TV | 0.105199237 | 0.087584827 |
| 445 | ----- | DAQSK (SEQ | 0.115532631 | 0.10378499 | 878 | NN | DS | 0.105199237 | 0.079694461 |
| | | ID NO: 3344) | | | | | | | |
| 134 | Q | P | 0.114967131 | 0.11371497 | 76 | MK | IC | 0.105199237 | 0.090203405 |
| 698 | - | KE | 0.114412847 | 0.098843087 | 227 | ALSDA (SEQ | SPERR (SEQ | 0.105199237 | 0.101107303 |
| | | | | | | ID NO: 3252) | ID NO: 3727) | | |
| 701 | QR | PV | 0.114412847 | 0.104102361 | 134 | Q-P | HCL | 0.105199237 | 0.057452451 |
| 281 | --- | PPQ | 0.114412847 | 0.077542482 | 794 | K-T | NCL | 0.105199237 | 0.055344005 |
| 708 | K | [stop] | 0.113715295 | 0.106986973 | 532 | ----- | INYFK (SEQ | 0.105199237 | 0.091675146 |
| | | | | | | | ID NO: 3478) | | |
| 696 | SYK | LQR | 0.113676993 | 0.07036758 | 558 | VI | AV | 0.105199237 | 0.093989814 |
| 703 | -- | TIQ | 0.113676993 | 0.062517799 | 610 | -- | LA | 0.105199237 | 0.085523633 |
| 596 | I | F | 0.113504467 | 0.107709004 | 82 | -H | DS | 0.105199237 | 0.045790293 |
| 197 | ------ | SIHVTRE | 0.108360722 | 0.081689422 | 780 | DW | AV | 0.105199237 | 0.092887336 |
| | | (SEQ ID NO: | | | | | | | |
| | | 3710) | | | | | | | |
| 510 | KQYNCA | SHLQNS | 0.108360722 | 0.044585998 | 708 | ------------- | KEVEQR | 0.105052225 | 0.060231645 |
| | (SEQ ID NO: | (SEQ ID NO: | | | | | (SEQ ID NO: | | |
| | 3271) | 3706) | | | | | 3493) | | |
| 953 | D | C | 0.108360722 | 0.098828046 | 548 | EAFE (SEQ | RPSR (SEQ | 0.105052225 | 0.087924295 |
| | | | | | | ID NO: 3255) | ID NO: 3675) | | |
| 63 | RA | SC | 0.108360722 | 0.091093584 | 251 | ----- | QKVIK (SEQ | 0.105052225 | 0.044504449 |
| | | | | | | | ID NO: 3642) | | |
| 597 | ----- | WNDLL (SEQ | 0.108360722 | 0.065802495 | | | | | |
| | | ID NO: 3842) | | | 497 | EA | AV | 0.105052225 | 0.084527693 |
| 208 | VK | CL | 0.108360722 | 0.044537036 | 841 | ------- | GKELKVE | 0.105052225 | 0.091417746 |
| | | | | | | | (SEQ ID NO: | | |
| | | | | | | | 3433) | | |
| 468 | ------- | KEADKDE | 0.108360722 | 0.074432186 | 575 | F- | LS | 0.105052225 | 0.076582865 |
| | | (SEQ ID NO: | | | | | | | |
| | | 3491) | | | | | | | |
| 84 | -Y | DS | 0.108360722 | 0.088490546 | 910 | ----- | VCLNC (SEQ | 0.105052225 | 0.090851749 |
| | | | | | | | ID NO: 3769) | | |
| 496 | -- | IE | 0.108360722 | 0.07371372 | 570 | ----- | EVNFN (SEQ | 0.104207678 | 0.100821855 |
| | | | | | | | ID NO: 3407) | | |
| 672 | P---E | SGCV (SEQ | 0.108360722 | 0.07159837 | 661 | -- | EN | 0.104134797 | 0.102286534 |
| | | ID NO: | | | | | | | |
| | | 3701)[stop] | | | | | | | |
| 910 | VC | AV | 0.108360722 | 0.062775349 | 500 | --- | NSI | 0.104134797 | 0.058937244 |
| 868 | EL | DR | 0.108360722 | 0.050620256 | 420 | ------- | AWERIDK | 0.104134797 | 0.06870659 |
| | | | | | | | (SEQ ID NO: | | |
| | | | | | | | 3337) | | |
| 235 | -- | AV | 0.108360722 | 0.094955272 | 285 | ------- | HTKEGIE | 0.10063092 | 0.059060467 |
| | | | | | | | (SEQ ID NO: | | |
| | | | | | | | 3465) | | |
| 332 | PL | RQ | 0.108360722 | 0.062876398 | 347 | --- | VCN | 0.10063092 | 0.070834064 |
| 461 | ------- | SFVIEGLK | 0.108360722 | 0.064022496 | 671 | - | D | 0.10063092 | 0.070617109 |
| | | (SEQ ID NO: | | | | | | | |
| | | 3699) | | | | | | | |
| 562 | KSGEI (SEQ | SPAR (SEQ | 0.108360722 | 0.067954904 | 103 | AP | DS | 0.10063092 | 0.044259819 |
| | ID NO: 3272) | ID NO: 3726)- | | | | | | | |
| 556 | ------ | YTVINKK | 0.108360722 | 0.070852948 | 584 | --- | PLA | 0.10063092 | 0.096095285 |
| | | (SEQ ID NO: | | | | | | | |
| | | 3861) | | | | | | | |
| 121 | RLT | SC- | 0.108360722 | 0.070897115 | 685 | GN | DS | 0.10063092 | 0.057986016 |
| 868 | EL | NW | 0.108360722 | 0.108128749 | 837 | ------- | TTINGKE | 0.10063092 | 0.070942034 |
| | | | | | | | (SEQ ID NO: | | |
| | | | | | | | 3763) | | |
| 745 | ---- | AVTQ (SEQ | 0.108360722 | 0.088762315 | 509 | ---- | SKQY (SEQ | 0.10063092 | 0.078527136 |
| | | ID NO: 3335) | | | | | ID NO: 3711) | | |
| 674 | ------ | GCPLSR | 0.107840626 | 0.089241733 | 914 | -C | LS | 0.10063092 | 0.094652044 |
| | | (SEQ ID NO: | | | | | | | |
| | | 3424) | | | | | | | |
| 185 | ------- | LGKFGQR | 0.107840626 | 0.068363178 | 932 | --- | WLF | 0.10063092 | 0.060195605 |
| | | (SEQ ID NO: | | | | | | | |
| | | 3547) | | | | | | | |
| 344 | WD | LS | 0.107840626 | 0.066070011 | 979 | LE[stop]G | VSRK (SEQ | 0.10063092 | 0.052097814 |
| | | | | | | | ID NO: 3794) | | |
| 274 | - | AF | 0.107840626 | 0.075101467 | 194 | ------ | DFYSIH (SEQ | 0.10063092 | 0.073983623 |
| | | | | | | | ID NO: 3354) | | |
| 577 | D | G | 0.1075508 | 0.10472372 | 596 | ---- | IWND (SEQ | 0.10063092 | 0.075782386 |
| | | | | | | | ID NO: 3486) | | |
| 700 | K | M | 0.107451835 | 0.099853237 | 32 | L | S | 0.099998377 | 0.098160777 |
| 641 | -- | RE | 0.106527066 | 0.104478931 | 822 | D | E | 0.099951571 | 0.083423411 |
| 599 | ---- | DLLS (SEQ | 0.106527066 | 0.100649327 | 957 | F | S | 0.099918571 | 0.054364404 |
| | | ID NO: 3363) | | | | | | | |
| 564 | GE | DR | 0.106527066 | 0.090487961 | 902 | ---- | HRPV (SEQ | 0.099764722 | 0.080515888 |
| | | | | | | | ID NO: 3462) | | |
| 836 | MT | IC | 0.106527066 | 0.100530022 | 474 | ----- | EFCRC (SEQ | 0.099764722 | 0.089224756 |
| | | | | | | | ID NO: 3383) | | |
| 853 | ----- | YNRYK (SEQ | 0.106527066 | 0.088862545 | 242 | --- | KYQ | 0.099764722 | 0.054563676 |
| | | ID NO: 3854) | | | | | | | |
| 586 | ---- | AFGK (SEQ | 0.106527066 | 0.08642655 | 342 | D | C | 0.099764722 | 0.075335971 |
| | | ID NO: 3311) | | | | | | | |
| 275 | -F | SV | 0.106527066 | 0.099879454 | 413 | -- | WG | 0.099764722 | 0.079591734 |
| 429 | -- | EG | 0.106527066 | 0.066947062 | 149 | ------- | KPHTNYF | 0.099764722 | 0.070518497 |
| | | | | | | | (SEQ ID NO: | | |
| | | | | | | | 3522) | | |
| 612 | N | T | 0.106459427 | 0.08415093 | 510 | KQY | SHL | 0.099764722 | 0.087972807 |
| 611 | --- | ANG | 0.105912094 | 0.09807063 | 775 | ---- | YTRM (SEQ | 0.097097924 | 0.054287911 |
| | | | | | | | ID NO: 3857) | | |
| 563 | ----- | SGEIV (SEQ | 0.105912094 | 0.10402865 | 607 | -- | SL | 0.097097924 | 0.071187897 |
| | | ID NO: 3703) | | | | | | | |
| 203 | E- | DR | 0.10545658 | 0.048953383 | 897 | -K | TE | 0.097097924 | 0.05492748 |
| 872 | -- | LS | 0.10545658 | 0.08227801 | 118 | GN | DS | 0.097097924 | 0.083309653 |
| 291 | EA | -C | 0.10545658 | 0.078263499 | 425 | D | V | 0.096834118 | 0.093228512 |
| 894 | S- | TG | 0.10545658 | 0.077864616 | 704 | -- | IQ | 0.096824625 | 0.053400496 |
| 851 | -T | LS | 0.10545658 | 0.071676834 | 207 | ---- | PVKPLE | 0.096824625 | 0.074740089 |
| | | | | | | | (SEQ ID NO: | | |
| | | | | | | | 3630) | | |
| 251 | -- | QK | 0.105199237 | 0.101057895 | 154 | -- | YF | 0.096824625 | 0.067984555 |
| 194 | ----- | DFYSI (SEQ | 0.105199237 | 0.05958457 | 668 | ---- | ALTD (SEQ | 0.096824625 | 0.088221952 |
| | | ID NO: 3353) | | | | | ID NO: 3322) | | |
| 236 | --- | VAS | 0.105199237 | 0.084024149 | 386 | -- | DR | 0.096824625 | 0.067625309 |
| 899 | RF | SC | 0.105199237 | 0.046835281 | 388 | ---- | KKGK (SEQ | 0.096824625 | 0.060426936 |
| | | | | | | | ID NO: 3498) | | |
| 533 | ---- | NYFK (SEQ | 0.104134797 | 0.074535749 | 880 | ---- | DISS (SEQ ID | 0.096824625 | 0.089590245 |
| | | ID NO: 3609) | | | | | NO: 3358) | | |
| 747 | --- | TQD | 0.104134797 | 0.072847901 | 783 | -------- | TAKLAYEG | 0.096824625 | 0.064829377 |
| | | | | | | | (SEQ ID NO: | | |
| | | | | | | | 3737) | | |
| 371 | -- | YK | 0.104134797 | 0.087850723 | 643 | -------- | VLDSSNIK | 0.096824625 | 0.089286037 |
| | | | | | | | (SEQ ID NO: | | |
| | | | | | | | 3785) | | |
| 625 | TR | -Q | 0.104134797 | 0.077810682 | 157 | --- | RCN | 0.096824625 | 0.095145301 |
| 195 | -- | FY | 0.104134797 | 0.074775738 | 576 | ------- | DDPNLII | 0.096824625 | 0.040738988 |
| | | | | | | | (SEQ ID NO: | | |
| | | | | | | | 3346) | | |
| 464 | -- | IE | 0.103802674 | 0.096071807 | 296 | ----- | VVAQI (SEQ | 0.096824625 | 0.081486595 |
| | | | | | | | ID NO: 3836) | | |
| 451 | A | T | 0.103708002 | 0.093659384 | 559 | -I | CL | 0.096824625 | 0.07248553 |
| 245 | DII | ETV | 0.10291048 | 0.070762893 | 979 | LE-[stop] | VSIK (SEQ ID | 0.096824625 | 0.050151323 |
| | | | | | | | NO: 3792) | | |
| 504 | ---- | DISG (SEQ ID | 0.10291048 | 0.066659076 | 767 | ------ | RTFMAE | 0.096824625 | 0.057097889 |
| | | NO: 3356) | | | | | (SEQ ID NO: | | |
| | | | | | | | 3692) | | |
| 323 | -Q | IH | 0.10291048 | 0.071312882 | 820 | ------- | DYDRVLE | 0.091736446 | 0.087280678 |
| | | | | | | | (SEQ ID NO: | | |
| | | | | | | | 3371) | | |
| 638 | ----- | FERRE (SEQ | 0.10291048 | 0.096842919 | 415 | KVY | NC- | 0.091736446 | 0.087802292 |
| | | ID NO: 3409) | | | | | | | |
| 593 | ------- | REFIWNDLL | 0.10291048 | 0.079136445 | 674 | GCPL (SEQ | DAH[stop] | 0.091736446 | 0.089744971 |
| | | (SEQ ID NO: | | | | ID NO: 3260) | | | |
| | | 3663) | | | | | | | |
| 730 | ------ | ADDMVR | 0.10291048 | 0.102673345 | 705 | QA | -C | 0.091736446 | 0.071260814 |
| | | (SEQ ID NO: | | | | | | | |
| | | 3304) | | | | | | | |
| 827 | KL | TV | 0.10291048 | 0.094773598 | 307 | -N | TD | 0.091736446 | 0.071147866 |
| 138 | VY | C- | 0.10291048 | 0.091363063 | 370 | G- | AV | 0.091736446 | 0.051182414 |
| 310 | QK | DR | 0.10291048 | 0.068590108 | 954 | KRA | T-V | 0.091736446 | 0.081861067 |
| 524 | KKL | RN [stop] | 0.102360708 | 0.063041226 | 326 | KGFPS (SEQ | RASLA (SEQ | 0.091644836 | 0.054125593 |
| | | | | | | ID NO: 3267) | ID NO: 3657) | | |
| 940 | ----- | YKKYQ (SEQ | 0.102324952 | 0.078047936 | 289 | GI | LS | 0.091644836 | 0.069499341 |
| | | ID NO: 3850) | | | | | | | |
| 918 | --- | THA | 0.102324952 | 0.066375654 | 142 | -E | CL | 0.091644836 | 0.064151435 |
| 979 | LE[stop]GSPG | VSSNDLQ | 0.102324952 | 0.073267994 | 10 | RR | TG | 0.091644836 | 0.090788699 |
| | (SEQ ID NO: | (SEQ ID NO: | | | | | | | |
| | 3251) | 3831) | | | | | | | |
| 4 | K | Q | 0.101594625 | 0.098660596 | 193 | LDFYSIH | RTSTAST | 0.091277438 | 0.058446074 |
| | | | | | | (SEQ ID NO: | (SEQ ID NO: | | |
| | | | | | | 3276) | 3694) | | |
| 589 | ----- | KRQGR (SEQ | 0.101233118 | 0.096410486 | 979 | LE[stop]GS- | VSIKDLQAS | 0.091277438 | 0.055852497 |
| | | ID NO: 3529) | | | | PGIK (SEQ ID | NK (SEQ ID | | |
| | | | | | | NO: | NO: 3793) | | |
| | | | | | | 3279)[stop] | | | |
| 211 | ----- | LEQIG (SEQ | 0.101233118 | 0.097193308 | 590 | ----- | RQGRE (SEQ | 0.091277438 | 0.07404543 |
| | | ID NO: 3544) | | | | | ID NO: 3678) | | |
| 649 | I | N | 0.101148579 | 0.091521137 | 308 | --- | LWQ | 0.091277438 | 0.063930973 |
| 220 | ------ | ASGPVG | 0.099764722 | 0.05025267 | 311 | -------- | KLKIGRDEA | 0.091277438 | 0.090951045 |
| | | (SEQ ID NO: | | | | | (SEQ ID NO: | | |
| | | 3330) | | | | | 3509) | | |
| 787 | AYEG (SEQ | PTRD (SEQ | 0.099764722 | 0.069079749 | 585 | ------ | LAFGKR | 0.091277438 | 0.057801256 |
| | ID NO: 3253) | ID NO: 3629) | | | | | (SEQ ID NO: | | |
| | | | | | | | 3534) | | |
| 888 | ----- | RSGEA (SEQ | 0.099764722 | 0.094243718 | 466 | ------- | GLKEADK | 0.091277438 | 0.064806465 |
| | | ID NO: 3685) | | | | | (SEQ ID NO: | | |
| | | | | | | | 3443) | | |
| 504 | ------ | DISGFS (SEQ | 0.099764722 | 0.091750112 | 414 | -- | GK | 0.089604136 | 0.067494445 |
| | | ID NO: 3357) | | | | | | | |
| 323 | QR | RD | 0.099764722 | 0.040967673 | 979 | LE[stop]GSPG | ISSKDLQ | 0.089062173 | 0.071078934 |
| | | | | | | (SEQ ID NO: | (SEQ ID NO: | | |
| | | | | | | 3251) | 3482) | | |
| 647 | SN | DS | 0.099764722 | 0.071118435 | 300 | ---- | IVIW (SEQ ID | 0.089062173 | 0.052509601 |
| | | | | | | | NO: 3485) | | |
| 740 | DLLY (SEQ | SAV- | 0.099753827 | 0.050146089 | 209 | KP | TV | 0.089062173 | 0.046404323 |
| | ID NO: 3254) | | | | | | | | |
| 38 | - | A | 0.099114744 | 0.090540757 | 851 | -T | CL | 0.089062173 | 0.047830666 |
| 261 | LA | PV | 0.099083678 | 0.060781559 | 466 | GL | LS | 0.089062173 | 0.060367604 |
| 255 | ---- | KKNE (SEQ | 0.098543421 | 0.07624083 | 202 | RE-- | SSSL (SEQ ID | 0.089062173 | 0.059904595 |
| | | ID NO: 3505) | | | | | NO: 3730) | | |
| 280 | ---- | LPPQ (SEQ | 0.098543421 | 0.069822078 | 291 | EA | DC | 0.089062173 | 0.078319771 |
| | | ID NO: 3567) | | | | | | | |
| 308 | LW | PV | 0.097993366 | 0.087176639 | 871 | RL | LS | 0.089062173 | 0.055570451 |
| 753 | --- | IFA | 0.097806547 | 0.045793305 | 874 | EE | DR | 0.089062173 | 0.077193595 |
| 205 | N | I | 0.097706358 | 0.075812724 | 868 | ELDR (SEQ | NWT- | 0.089062173 | 0.059312334 |
| | | | | | | ID NO: 3257) | | | |
| 142 | E | Q | 0.097553503 | 0.074603349 | 301 | VI | AV | 0.089062173 | 0.083633904 |
| 717 | ------- | GYSRKYAS | 0.097097924 | 0.054767341 | 208 | ---- | VKPLEQI | 0.089062173 | 0.046334388 |
| | | (SEQ ID NO: | | | | | (SEQ ID NO: | | |
| | | 3459) | | | | | 3784) | | |
| 979 | LE[stop]GSPG | VSSKDLH | 0.097097924 | 0.068112769 | 305 | -N | TT | 0.089062173 | 0.072049193 |
| | (SEQ ID NO: | (SEQ ID NO: | | | | | | | |
| | 3251) | 3806) | | | | | | | |
| 527 | NLYL (SEQ | TCT[stop] | 0.097097924 | 0.089930288 | 978 | [stop]L | GP | 0.089062173 | 0.071277586 |
| | ID NO: 3283) | | | | | | | | |
| 230 | D | T | 0.097097924 | 0.061172404 | 866 | S- | TG | 0.089062173 | 0.056446779 |
| 595 | ---- | FIWN (SEQ | 0.097097924 | 0.075559339 | 628 | DE | LS | 0.089062173 | 0.070268313 |
| | | ID NO: 3413) | | | | | | | |
| 526 | LN | PV | 0.097097924 | 0.065035268 | 651 | -P | TA | 0.089062173 | 0.05500823 |
| 928 | IA | TV | 0.096824625 | 0.059262285 | 276 | --- | PKI | 0.089062173 | 0.06318371 |
| 694 | --- | GES | 0.096824625 | 0.04858003 | 299 | - | V | 0.089062173 | 0.08531757 |
| 190 | --- | QRA | 0.096824625 | 0.080026424 | 346 | -- | MV | 0.089062173 | 0.060831249 |
| 601 | ------- | LSLETGS | 0.096824625 | 0.078527715 | 742 | LY | PV | 0.089062173 | 0.087665343 |
| | | (SEQ ID NO: | | | | | | | |
| | | 3576) | | | | | | | |
| 150 | -- | PH | 0.096482996 | 0.069152449 | 743 | YY | ET | 0.089062173 | 0.059923968 |
| 307 | --- | NLW | 0.096482996 | 0.053647152 | 751 | ML | RQ | 0.089062173 | 0.045208162 |
| 808 | --- | TCS | 0.096381808 | 0.086676449 | 894 | -S | RQ | 0.089062173 | 0.071980752 |
| 687 | ------- | PTHILRI | 0.095815136 | 0.067505643 | 433 | KH | TV | 0.089062173 | 0.061328218 |
| | | (SEQ ID NO: | | | | | | | |
| | | 3628) | | | | | | | |
| 469 | --- | EAD | 0.095416799 | 0.081758814 | 899 | RF | LS | 0.089062173 | 0.083069213 |
| 181 | VTYS (SEQ | SHTA (SEQ | 0.095412022 | 0.081952005 | 582 | --- | ILP | 0.089062173 | 0.053169618 |
| | ID NO: 3295) | ID NO: 3708) | | | | | | | |
| 814 | F | C | 0.095092296 | 0.090308339 | 979 | LE[stop]GS- | VSSKDLHAS | 0.087252372 | 0.071793737 |
| | | | | | | PGIK (SEQ ID | N (SEQ ID | | |
| | | | | | | NO:) | NO: 3807) | | |
| 389 | K | [stop] | 0.094408724 | 0.074513611 | 735 | ------ | RNTARD | 0.087252372 | 0.052948743 |
| | | | | | | | (SEQ ID NO: | | |
| | | | | | | | 3672) | | |
| 663 | I | C | 0.094255793 | 0.075689829 | 227 | ------------ | ALSDACM | 0.087252372 | 0.073258454 |
| | | | | | | | (SEQ ID NO: | | |
| | | | | | | | 3321) | | |
| 979 | L | I | 0.092483102 | 0.077877212 | 151 | HTNYFGRCN | TPTTSADAT | 0.087252372 | 0.05854259 |
| | | | | | | V (SEQ ID | C (SEQ ID | | |
| | | | | | | NO: 3264) | NO: 3758) | | |
| 290 | I- | LS | 0.092483102 | 0.055600721 | 875 | ------ | ESVNND | 0.087252372 | 0.069839022 |
| | | | | | | | (SEQ ID NO: | | |
| | | | | | | | 3397) | | |
| 202 | R-------E | SSSLASGL | 0.092483102 | 0.051559995 | 151 | -H | CL | 0.087252372 | 0.072166234 |
| | | (SEQ ID NO: | | | | | | | |
| | | 3731)[stop] | | | | | | | |
| 130 | S | I | 0.092259428 | 0.091849472 | 517 | ----- | IWQKD (SEQ | 0.087252372 | 0.059389612 |
| | | | | | | | ID NO: 3488) | | |
| 237 | A | V | 0.092157582 | 0.073154252 | 294 | NN | ET | 0.087252372 | 0.054113615 |
| 550 | F- | LS | 0.091736446 | 0.078399586 | 979 | LE[stop]GS- | VSSEDLQAS | 0.087252372 | 0.053550045 |
| | | | | | | PGIK (SEQ ID | NK (SEQ ID | | |
| | | | | | | NO: | NO: 3796) | | |
| | | | | | | 3279)[stop] | | | |
| 352 | --- | KLI | 0.091736446 | 0.062601185 | 280 | LP | C- | 0.087252372 | 0.046361662 |
| 257 | ------ | NEKRLA | 0.091736446 | 0.074344692 | 973 | WK | CL | 0.087252372 | 0.043130788 |
| | | (SEQ ID NO: | | | | | | | |
| | | 3591) | | | | | | | |
| 978 | [stop]LE | QVS | 0.091736446 | 0.070305933 | 859 | - | Q | 0.087252372 | 0.049734005 |
| 878 | NN | ET | 0.091736446 | 0.057372719 | 383 | ----- | SEEDR (SEQ | 0.087252372 | 0.079531899 |
| | | | | | | | ID NO: 3695) | | |
| 484 | -KWYGD | NSSLSA | 0.091736446 | 0.051261975 | 193 | -------- | LDFYSIHVT | 0.087252372 | 0.075700876 |
| | (SEQ ID NO: | (SEQ ID NO: | | | | | (SEQ ID NO: | | |
| | 3274) | 3601) | | | | | 3542) | | |
| 796 | -- | YL | 0.08954136 | 0.077067905 | 731 | ---- | DDMV (SEQ | 0.087252372 | 0.055852115 |
| | | | | | | | ID NO: 3345) | | |
| 872 | --- | LSE | 0.089427419 | 0.072631533 | 586 | --- | AFG | 0.087252372 | 0.059593552 |
| 388 | ----- | KKGKK (SEQ | 0.089427419 | 0.050485092 | 11 | RR | GD | 0.087252372 | 0.07840862 |
| | | ID NO: 3499) | | | | | | | |
| 211 | LEQIGG | RNRSAA | 0.089427419 | 0.058037112 | 979 | LE[stop]G | VPSK (SEQ | 0.086010969 | 0.05573546 |
| | (SEQ ID NO: | (SEQ ID NO: | | | | | ID NO: 3787) | | |
| | 3281) | 3671) | | | | | | | |
| 193 | LDFYSIHV | RTSTAST | 0.089427419 | 0.06189365 | 671 | D | V | 0.084756133 | 0.072837893 |
| | (SEQ ID NO: | (SEQ ID NO: | | | | | | | |
| | 3277) | 3694)[stop] | | | | | | | |
| 769 | FMAERQY | LWPRGST | 0.089427419 | 0.048645432 | 462 | --- | FVI | 0.083590457 | 0.068208408 |
| | (SEQ ID NO: | (SEQ ID NO: | | | | | | | |
| | 3258) | 3582) | | | | | | | |
| 558 | --- | VIN | 0.089427419 | 0.08506841 | 619 | TLYNRRTR | PCTTGEPD | 0.083590457 | 0.071170573 |
| | | | | | | (SEQ ID NO: | (SEQ ID NO: | | |
| | | | | | | 3292) | 3613) | | |
| 973 | --- | WKP | 0.089427419 | 0.059845159 | 337 | QA | PV | 0.083590457 | 0.078536227 |
| 285 | ---- | HTKE (SEQ | 0.089427419 | 0.058488636 | 418 | ---- | DEAW (SEQ | 0.083590457 | 0.038813523 |
| | | ID NO: 3463) | | | | | ID NO: 3347) | | |
| 353 | -- | LI | 0.089427419 | 0.055053978 | 426 | -- | KK | 0.083590457 | 0.07413354 |
| 950 | ---- | GNTD (SEQ | 0.089427419 | 0.068410765 | 208 | VK | AV | 0.083590457 | 0.037512118 |
| | | ID NO: 3445) | | | | | | | |
| 642 | ----- | EVLDS (SEQ | 0.089427352 | 0.04064403 | 519 | -- | QK | 0.083590457 | 0.082570582 |
| | | ID NO: 3405) | | | | | | | |
| 586 | AF | ET | 0.089427352 | 0.026351335 | 122 | LT | D[stop] | 0.083590457 | 0.076976074 |
| 147 | KG | C- | 0.089427352 | 0.03353623 | 659 | RG | PV | 0.083590457 | 0.0659041 |
| 473 | ----- | DEFCR (SEQ | 0.089427352 | 0.087380064 | 160 | ------- | VSEHERL | 0.083590457 | 0.081613302 |
| | | ID NO: 3350) | | | | | (SEQ ID NO: | | |
| | | | | | | | 3790) | | |
| 62 | SR | CL | 0.089427352 | 0.085389222 | 278 | IT | TA | 0.083590457 | 0.047460329 |
| 946 | N | C | 0.089427352 | 0.086906423 | 242 | KY | CL | 0.083590457 | 0.045794039 |
| 341 | ----- | VDWWD | 0.089427352 | 0.088291312 | 518 | WQ | GR | 0.08340916 | 0.072293259 |
| | | (SEQ ID NO: | | | | | | | |
| | | 3772) | | | | | | | |
| 546 | --- | KPE | 0.089427352 | 0.070048864 | 513 | ---- | NCAF (SEQ | 0.08340916 | 0.058923148 |
| | | | | | | | ID NO: 3587) | | |
| 979 | LE[stop]G-- | VSSKDLQAC | 0.089062173 | 0.059857989 | 31 | L | C | 0.082126328 | 0.081561344 |
| | SPGI (SEQ ID | L (SEQ ID | | | | | | | |
| | NO: 3278) | NO: 3811) | | | | | | | |
| 944 | --- | QTN | 0.089062173 | 0.066135158 | 868 | E | G | 0.081974564 | 0.070868354 |
| 170 | SP | RQ | 0.089062173 | 0.059574685 | | | | | |
| 771 | ----- | AERQY (SEQ | 0.089062173 | 0.079594468 | 681 | ----- | KDSLG (SEQ | 0.080796062 | 0.070617083 |
| | | ID NO: 3309) | | | | | ID NO: 3489) | | |
| 808 | TC | DS | 0.089062173 | 0.069853908 | 552 | -- | AN | 0.080796062 | 0.080329675 |
| 347 | -- | VC | 0.089062173 | 0.085265549 | 168 | --- | LLS | 0.080796062 | 0.076933587 |
| 554 | RF | SC | 0.089062173 | 0.05713278 | 418 | -------- | DEAWERID | 0.080796062 | 0.062400841 |
| | | | | | | | (SEQ ID NO: | | |
| | | | | | | | 3349) | | |
| 419 | EA | LS | 0.089062173 | 0.062902243 | 356 | ----- | EKKED (SEQ | 0.080428937 | 0.076250147 |
| | | | | | | | ID NO: 3391) | | |
| 184 | ------ | SLGKFG | 0.089062173 | 0.066443269 | 904 | -- | PV | 0.077521024 | 0.061782081 |
| | | (SEQ ID NO: | | | | | | | |
| | | 3716) | | | | | | | |
| 524 | K-K | ETE | 0.089062173 | 0.078642197 | 8 | KIR | ETG | 0.075979618 | 0.06718831 |
| 544 | KI | NC | 0.089062173 | 0.051439626 | 963 | ---- | SFYR (SEQ | 0.075979618 | 0.064323698 |
| | | | | | | | ID NO: 3700 | | |
| 417 | ------ | YDEAWE | 0.089062173 | 0.084599468 | 34 | RV | SC | 0.075979618 | 0.063118319 |
| | | (SEQ ID NO: | | | | | | | |
| | | 3847) | | | | | | | |
| 911 | CL | DR | 0.089062173 | 0.07167912 | 369 | ------ | AGYKRQ | 0.075979618 | 0.050848396 |
| | | | | | | | (SEQ ID NO: | | |
| | | | | | | | 3313) | | |
| 735 | -------- | RNTARDLLY | 0.089062173 | 0.058412514 | 242 | KY | TV | 0.075979618 | 0.056127246 |
| | | (SEQ ID NO: | | | | | | | |
| | | 3673) | | | | | | | |
| 305 | N | D | 0.089057834 | 0.075458081 | 297 | VAQIV (SEQ | WPRS (SEQ | 0.075979618 | 0.07433917 |
| | | | | | | ID NO: 3293) | ID NO: | | |
| | | | | | | | 3843)[stop] | | |
| 886 | KGR | RAD | 0.08869535 | 0.056741957 | 672 | -P | LS | 0.075979618 | 0.056690099 |
| 235 | A | P | 0.088591922 | 0.085721293 | 650 | KP | TV | 0.075979618 | 0.062837656 |
| 494 | ------- | FAIEAEN | 0.088487772 | 0.046582849 | 454 | DW | AV | 0.075979618 | 0.049282705 |
| | | (SEQ ID NO: | | | | | | | |
| | | 3408) | | | | | | | |
| 957 | F | Y | 0.088355066 | 0.088244344 | 312 | LK | PV | 0.075979618 | 0.074673373 |
| 670 | ----- | TDPEG (SEQ | 0.087352311 | 0.070989739 | 636 | LT | PV | 0.075651042 | 0.051037357 |
| | | ID NO: 3742) | | | | | | | |
| 388 | -- | KK | 0.087352311 | 0.077174067 | 325 | ----- | LKGFP (SEQ | 0.075651042 | 0.068819815 |
| | | | | | | | ID NO: 3557) | | |
| 294 | -- | NN | 0.087352311 | 0.079627552 | 669 | L | E | 0.075651042 | 0.075396635 |
| 748 | ------ | QDAMLI | 0.087352311 | 0.070738039 | 79 | A | V | 0.074780904 | 0.074608034 |
| | | (SEQ ID NO: | | | | | | | |
| | | 3632) | | | | | | | |
| 978 | [stop]LE[stop] | SVSSK (SEQ | 0.087252372 | 0.078631278 | 887 | | GRSGEA | 0.073542892 | 0.072424639 |
| | G | ID NO: 3734) | | | | | (SEQ ID NO: | | |
| | | | | | | | 3452) | | |
| 743 | ------ | YYAVTQ | 0.087252372 | 0.074424467 | 404 | EIL | DR | 0.073542892 | 0.054184233 |
| | | (SEQ ID NO: | | | | | | | |
| | | 3865) | | | | | | | |
| 90 | KDP | NCL | 0.087252372 | 0.062483354 | 190 | Q-R | HVA | 0.073542892 | 0.04828771 |
| 459 | --- | KAS | 0.087252372 | 0.077679223 | 811 | NC | DS | 0.073542892 | 0.073088889 |
| 319 | -------- | AKPLQRLK | 0.087252372 | 0.077741662 | 824 | ---- | VLEK (SEQ | 0.073542892 | 0.055393108 |
| | | (SEQ ID NO: | | | | | ID NO: 3786) | | |
| | | 3316) | | | | | | | |
| 844 | ------- | LKVEGQI | 0.087252372 | 0.078010123 | 63 | RA | TV | 0.073542892 | 0.069467367 |
| | | (SEQ ID NO: | | | | | | | |
| | | 3558) | | | | | | | |
| 964 | ----- | FYRKK (SEQ | 0.087252372 | 0.061717189 | 350 | VK | AV | 0.072378636 | 0.048322939 |
| | | ID NO: 3422) | | | | | | | |
| 510 | ----- | KQYNC (SEQ | 0.087252372 | 0.072460113 | 690 | ILRI (SEQ ID | PEN- | 0.072378636 | 0.05860973 |
| | | ID NO: 3526) | | | | NO: 3265) | | | |
| 211 | LE | C- | 0.087252372 | 0.072615166 | 384 | EED | D-C | 0.072378636 | 0.064425519 |
| 154 | --- | YFG | 0.087252372 | 0.050562832 | 349 | ------- | NVKKLIN | 0.071251281 | 0.055420168 |
| | | | | | | | (SEQ ID NO: | | |
| | | | | | | | 3605) | | |
| 428 | - | V | 0.087252372 | 0.070602271 | 427 | KVE | NCL | 0.071251281 | 0.037488341 |
| 328 | ------- | FPSFPLV | 0.087252372 | 0.050986167 | 537 | GGKLRFK | AASCGSR | 0.071251281 | 0.047685675 |
| | | (SEQ ID NO: | | | | (SEQ ID NO: | (SEQ ID NO: | | |
| | | 3415) | | | | 3261) | 3301) | | |
| 334 | --- | VER | 0.087252372 | 0.083245674 | 486 | ----- | YGDLR (SEQ | 0.071251281 | 0.057530417 |
| | | | | | | | ID NO: 3849) | | |
| 635 | --- | ALT | 0.087252372 | 0.058640453 | 586 | ------- | AFGKRQG | 0.071251281 | 0.055531439 |
| | | | | | | | (SEQ ID NO: | | |
| | | | | | | | 3312) | | |
| 87 | EF | DC | 0.087252372 | 0.084662756 | 850 | ---- | ITYY (SEQ | 0.071251281 | 0.070061657 |
| | | | | | | | ID NO: 34843) | | |
| 763 | ---- | RQGK (SEQ | 0.087252372 | 0.06272177 | 929 | --- | ARS | 0.071251281 | 0.070844259 |
| | | ID NO: 3677) | | | | | | | |
| 525 | ---- | KLNL (SEQ | 0.087252372 | 0.087055601 | 617 | EK | AV | 0.071251281 | 0.056273969 |
| | | ID NO: 3511) | | | | | | | |
| 482 | LQK | PLM | 0.087252372 | 0.0864173 | 977 | V[stop] | AV | 0.071036023 | 0.057250091 |
| 228 | -- | LS | 0.087252372 | 0.071648918 | 522 | --- | GVK | 0.071036023 | 0.066325629 |
| 149 | ---- | KPHT (SEQ | 0.087252372 | 0.063809398 | 903 | RP | LS | 0.070891186 | 0.042147704 |
| | | ID NO: 3520) | | | | | | | |
| 14 | VKDSNTK | SRTATQR | 0.087252372 | 0.086609324 | 689 | HI | P- | 0.070270828 | 0.063050321 |
| | (SEQ ID NO: | (SEQ ID NO: | | | | | | | |
| | 3294) | 3729) | | | | | | | |
| 567 | VP | C- | 0.087252372 | 0.05902513 | 663 | - | I | 0.070270828 | 0.06150934 |
| 275 | -- | FP | 0.080428937 | 0.059363481 | 649 | IK | RQ | 0.070270828 | 0.060647973 |
| 308 | ------ | LWQKLK | 0.080428937 | 0.078547724 | 258 | -- | EK | 0.070270828 | 0.058125711 |
| | | (SEQ ID NO: | | | | | | | |
| | | 3583) | | | | | | | |
| 15 | KDSNTKK | RTATQRR | 0.080428937 | 0.072523813 | 152 | TN | DS | 0.070270828 | 0.059660679 |
| | (SEQ ID NO: | (SEQ ID NO: | | | | | | | |
| | 3266) | 3690) | | | | | | | |
| 979 | LE[stop]GSPG | VSSKDLQG | 0.080428937 | 0.070440346 | 351 | ----- | KKLINE | 0.070270828 | 0.061736597 |
| | I (SEQ ID NO: | (SEQ ID NO: | | | | | (SEQ ID NO: | | |
| | 3278) | 3818) | | | | | 3503) | | |
| 425 | --- | DKK | 0.080428937 | 0.056582403 | 763 | -- | RQ | 0.070270828 | 0.05541295 |
| 288 | EGI | RAS | 0.080428937 | 0.054809688 | 666 | VI | DS | 0.070270828 | 0.069953364 |
| 849 | QI | R- | 0.080428937 | 0.058314054 | 186 | GK | RQ | 0.066783091 | 0.059043838 |
| 526 | ----- | LNLYL (SEQ | 0.080428937 | 0.073029285 | 242 | ------- | KYQDHLE | 0.066783091 | 0.058248788 |
| | | ID NO: 3564) | | | | | (SEQ ID NO: | | |
| | | | | | | | 3533) | | |
| 546 | ---- | KPEA (SEQ | 0.080428937 | 0.06983999 | 190 | ------- | QRALDFYS | 0.066783091 | 0.060436783 |
| | | ID NO: 3519) | | | | | | | |
| 792 | -- | PS | 0.080428937 | 0.067496853 | 484 | --KWYGDL | NSSLSASF | 0.061911903 | 0.060235262 |
| | | | | | | (SEQ ID NO: | (SEQ ID NO: | | |
| | | | | | | 3275) | 3603) | | |
| 706 | -------- | AAKEVEQR | 0.080428937 | 0.075434091 | 416 | VY | CT | 0.061911903 | 0.058375882 |
| | | (SEQ ID NO: | | | | | | | |
| | | 3300) | | | | | | | |
| 710 | ---- | VEQR (SEQ | 0.080165897 | 0.064037522 | 900 | FS | SV | 0.060850202 | 0.045333847 |
| | | ID NO: 3775) | | | | | | | |
| 949 | -T | LS | 0.080165897 | 0.057028434 | 550 | FE | CL | 0.060850202 | 0.050669807 |
| 224 | V | C | 0.080165897 | 0.062705318 | 169 | LS | -P | 0.059253838 | 0.055169203 |
| 202 | ----- | RESNH (SEQ | 0.08002463 | 0.069004172 | 487 | GD | CL | 0.058561444 | 0.050771143 |
| | | ID NO: 3664) | | | | | | | |
| 380 | YLS | -T[stop] | 0.079267535 | 0.078743084 | 800 | ------ | TLAQYT | 0.058239485 | 0.054115265 |
| | | | | | | | (SEQ ID NO: | | |
| | | | | | | | 3753) | | |
| 617 | --- | EKT | 0.079267535 | 0.066283102 | 863 | KD | RI | 0.058239485 | 0.041340026 |
| 237 | AS | TA | 0.079267535 | 0.061120875 | 407 | KKHGE (SEQ | RSTAR (SEQ | 0.058239485 | 0.049050481 |
| | | | | | | ID NO: 3268) | ID NO: 3687) | | |
| 416 | VYD | C-T | 0.07889536 | 0.067603097 | 593 | ------ | REFIW (SEQ | 0.058239485 | 0.057097188 |
| | | | | | | | ID NO: 3662) | | |
| 554 | -------- | RFYTVINKK | 0.078495111 | 0.06923226 | 979 | LE[stop]G-SP | VSSKVLQ | 0.050653241 | 0.049828056 |
| | | (SEQ ID NO: | | | | | (SEQ ID NO: | | |
| | | 3667) | | | | | 3827) | | |
| 619 | TLYN (SEQ | PC-T | 0.078181072 | 0.043873495 | 42 | ER | A- | 0.050653241 | 0.043693463 |
| | ID NO: 3291) | | | | | | | | |
| 487 | ------ | GDLRGKP | 0.072378636 | 0.071208648 | 897 | -- | KK | 0.050653241 | 0.046680114 |
| | | (SEQ ID NO: | | | | | | | |
| | | 3429) | | | | | | | |
| 644 | L | [stop] | 0.072378636 | 0.060246346 | 294 | NN | DS | 0.049177787 | 0.048944158 |
| 544 | KI | TV | 0.072378636 | 0.05442277 | 186 | GKFGQRAL | ASSDREPWT | 0.049177787 | 0.048777834 |
| | | | | | | DFY (SEQ ID | ST (SEQ ID | | |
| | | | | | | NO: 3262) | NO: | 3331) | |
| 933 | ---- | LFLR (SEQ | 0.072378636 | 0.06374014 | 696 | SYK | -LQ | 0.049177787 | 0.048584657 |
| | | ID NO: 3546) | | | | | | | |
| 276 | PKITLP (SEQ | LRSPCL | 0.072378636 | 0.070970251 | 552 | AN | DS | 0.049177787 | 0.044744659 |
| | ID NO: 3284) | (SEQ ID NO: | | | | | | | |
| | | 3570) | | | | | | | |
| 808 | ------- | TCSNCGFT | 0.072378636 | 0.065622369 | 979 | LE[stop]G- | VSSKYLQAS | 0.049086177 | 0.048688856 |
| | | (SEQ ID NO: | | | | SPGIK (SEQ | NK (SEQ ID | | |
| | | 3740) | | | | ID NO: | NO: 3828) | | |
| | | | | | | 3279)[stop] | | | |
| 978 | [stop]LE[stop] | YVSSKDL | 0.072378636 | 0.066035046 | 413 | -------- | WGKVYDEA | 0.048681821 | 0.046101055 |
| | GS- | (SEQ ID NO: | | | | | (SEQ ID NO: | | |
| | | 3862) | | | | | 3840) | | |
| 919 | HA | PV | 0.072378636 | 0.058676376 | 920 | ----- | AAEQA (SEQ | 0.048224673 | 0.046055533 |
| | | | | | | | ID NO: 3299) | | |
| 378 | -------- | LPYLSSE | 0.072378636 | 0.071574474 | | | | | |
| | | (SEQ ID NO: | | | | | | | |
| | | 3569) | | | | | | | |
| 858 | RQ | LS | 0.072378636 | 0.04290216 | | | | | |
| 152 | -------- | TNYFGRCN | 0.072378636 | 0.054244402 | | | | | |
| | | (SEQ ID NO: | | | | | | | |
| | | 3757) | | | | | | | |
| 859 | ------ | QNVVKD | 0.072378636 | 0.069366552 | | | | | |
| | | (SEQ ID NO: | | | | | | | |
| | | 3644) | | | | | | | |
| 226 | KA | LS | 0.071324732 | 0.06748566 | | | | | |
| 849 | ------ | QITYYN | 0.071251281 | 0.061753986 | | | | | |
| | | (SEQ ID NO: | | | | | | | |
| | | 3640) | | | | | | | |
| 376 | ---- | ALLP (SEQ | 0.071251281 | 0.046839434 | | | | | |
| | | ID NO: 3318) | | | | | | | |
| 660 | --- | GEN | 0.071251281 | 0.063597301 | | | | | |
| | | (SEQ ID NO: | | | | | | | |
| | | 3647) | | | | | | | |
| 615 | VI | DS | 0.066783091 | 0.065544343 | | | | | |
| 295 | | NVVAQI | 0.066783091 | 0.066726619 | | | | | |
| | | (SEQ ID NO: | | | | | | | |
| | | 3608) | | | | | | | |
| 549 | AFE | PTR | 0.066783091 | 0.063274062 | | | | | |
| 924 | -AL | PSG | 0.066783091 | 0.057049314 | | | | | |
| 979 | LE[stop] | VSR | 0.06547263 | 0.059545386 | | | | | |
| 284 | P | L | 0.06489326 | 0.063807972 | | | | | |
| 620 | -- | LY | 0.06268489 | 0.052769076 | | | | | |
| 668 | -A | LS | 0.06268489 | 0.057930418 | | | | | |
| 651 | ---- | PMNL (SEQ | 0.06268489 | 0.054376534 | | | | | |
| | | ID NO: 3619) | | | | | | | |
| 723 | --SK | PPLL (SEQ ID | 0.061911903 | 0.057719078 | | | | | |
| | | NO: 3621) | | | | | | | |
| 788 | YEG | TRD | 0.061911903 | 0.061258021 | | | | | |
| 572 | NF | DS | 0.061911903 | 0.059419672 | | | | | |
| 943 | ---- | YQTN (SEQ | 0.061911903 | 0.05179175 | | | | | |
| | | ID NO: 3856) | | | | | | | |
| 979 | LE[stop]GS-P | VSSKDVQ | 0.061911903 | 0.05324798 | | | | | |
| | | (SEQ ID NO: | | | | | | | |
| | | 3825) | | | | | | | |
| 49 | KK | RS | 0.061911903 | 0.057783548 | | | | | |
| 745 | -A | LS | 0.061911903 | 0.055420231 | | | | | |
| 262 | -AN | ETD | 0.061911903 | 0.056977155 | | | | | |
| 726 | ---- | AKNL (SEQ | 0.061911903 | 0.05965082 | | | | | |
| | | ID NO: 3315) | | | | | | | |
| 583 | ---- | LPLA (SEQ | 0.061911903 | 0.053222838 | | | | | |
| | | ID NO: 3566) | | | | | | | |
| 585 | -- | LA | 0.061911903 | 0.047677961 | | | | | |
| 347 | -------- | VCNVKKLI | 0.061911903 | 0.060561898 | | | | | |
| | | (SEQ ID NO: | | | | | | | |
| | | 3771) | | | | | | | |
| 735 | RN | Q- | 0.061911903 | 0.057911259 | | | | | |
| 176 | AN | TD | 0.061911903 | 0.042711394 | | | | | |
| 979 | LE[stop]GSPG | VSSKDFQ | 0.047884408 | 0.043419619 | | | | | |
| | (SEQ ID NO: | (SEQ | ID NO: | | | | | | |
| | 3251) | 3801) | | | | | | | |
| 423 | RIDKKV | ---NRQ | 0.046868759 | 0.045505043 | | | | | |
| | (SEQ ID NO: | | | | | | | | |
| | 3286) | | | | | | | | |
| 162 | EH | AV | 0.043166861 | 0.040108447 | | | | | |
| 741 | LLY | CC- | 0.041101883 | 0.039741701 | | | | | |
| 443 | SEDAQS | RGRPI (SEQ | 0.041101883 | 0.03770041 | | | | | |
| | (SEQ ID NO: | ID NO: | | | | | | | |
| | 3288) | 3668)[stop] | | | | | | | |
| 767 | RT | TA | 0.041101883 | 0.040956261 | | | | | |

[stop] represent a stop codon, so that amino acids that follow are additional amino acids after a stop codon. (−) holds the position for the insertion shown in the adjacent “Alteration” column. Pos.: Position; Ref.: Reference; Alt.: Alternation; Med. Enrich.: Median Enrichment.

### Example 5: Cleavage Activity of Selected CasX Variant Proteins and Variant Protein:sgRNA Pairs

[0353] The effect of select CasX variant proteins on CasX protein activity, using a reference sgRNA scaffold (SEQ ID NO: 5) and E6 and/or E7 spacers is shown in Table 29 below and FIGS. 10 and 11.

[0354] In brief, EGFP HEK293T reporter cells were seeded into 96-well plates and transfected according to the manufacturer's protocol with lipofectamine 3000 (Life Technologies) and 50-200 ng plasmid DNA encoding the variant CasX protein, P2A-puromycin fusion and the reference sgRNA. The next day cells were selected with 1.5 μg/ml puromycin for 2 days and analyzed by fluorescence-activated cell sorting 7 days after selection to allow for clearance of EGFP protein from the cells EGFP disruption via editing was traced using an Attune NxT Flow Cytometer and high-throughput autosampler.

TABLE 29
Effect of CasX Protein Variants.

| Norm | SD | Mut. | SEQ ID NO |
|---|---|---|---|
| 3.56 | 0.479918161 | L379R + C477K + A708K + [P793] + T620P | 3866 |
| 3.44 | 0.065473567 | M771A | 3867 |
| 3.25 | 0.243066966 | L379R + A708K + [P793] + D732N | 3868 |
| 3.2 | 0.065443719 | W782Q | 3869 |
| 3.08 | 0.06581193 | M771Q | 3870 |
| 3.06 | 0.098482124 | R458I + A739V | 3871 |
| 2.99 | 0.249667198 | L379R + A708K + [P793] + M771N | 3872 |
| 2.98 | 0.226829483 | L379R + A708K + [P793] + A739T | 3873 |
| 2.98 | 0.230093698 | L379R + C477K + A708K + [P793] + D489S | 3874 |
| 2.95 | 0.225022742 | L379R + C477K + A708K + [P793] + D732N | 3875 |
| 2.95 | 0.048047426 | V711K | 3876 |
| 2.85 | 0.244869555 | L379R + C477K + A708K + [P793] + Y797L | 3877 |
| 2.84 | 0.16661152 | L379R + A708K + [P793] | 3878 |
| 2.82 | 0.219742241 | L379R + C477K + A708K + [P793] + M771N | 3879 |
| 2.75 | 0.215673641 | A708K + [P793] + E386S | 3880 |
| 2.71 | 0.10301172 | L379R + C477K + A708K + [P793] | 3881 |
| 2.62 | 0.066259269 | L792D | 3882 |
| 2.61 | 0.069056066 | G791F | 3883 |
| 2.56 | 0.138158681 | A708K + [P793] + A739V | 3884 |
| 2.52 | 0.110846334 | L379R + A708K + [P793] + A739V | 3885 |
| 2.5 | 0.070762901 | C477K + A708K + [P793] | 3886 |
| 2.47 | 0.180431811 | L249I, M771N | 3887 |
| 2.46 | 0.050035486 | V747K | 3888 |
| 2.42 | 0.14702229 | L379R + C477K + A708K + [P793] + M779N | 3889 |
| 2.36 | 0.045498608 | F755M | 3890 |
| 2.3 | 0.179759799 | L379R + A708K + [P793] + G791M | 3891 |
| 2.29 | 0.16573206 | E386R + F399L + [P793] | 3892 |
| 2.24 | 0.000278715 | A708K + [P793] | 3893 |
| 2.23 | 0.243365847 | L404K | 3894 |
| 2.16 | 0.019745961 | E552A | 3895 |
| 2.13 | 0.002238075 | A708K | 3896 |
| 2.08 | 0.316339196 | M779N | 3897 |
| 2.08 | 0.062500445 | P793G | 3898 |
| 2.07 | 0.117354932 | L379R + C477K + A708K + [P793] + A739V | 3899 |
| 2.03 | 0.057771128 | L792K | 3900 |
| 2.01 | 0.186905281 | L379R + A708K + [P793] + M779N | 3901 |
| 2.01 | 0.080358848 | \hat{ }AS797 | 3902 |
| 1.95 | 0.218366091 | C477H | 3903 |
| 1.95 | 0.040076499 | Y857R | 3904 |
| 1.94 | 0.032799694 | L742W | 3905 |
| 1.94 | 0.038256856 | I658V | 3906 |
| 1.93 | 0.055533894 | C477K + A708K + [P793] + A739V | 3907 |
| 1.9 | 0.028572575 | S932M | 3908 |
| 1.84 | 0.115143156 | T620P | 3909 |
| 1.81 | 0.18802403 | E385P | 3910 |
| 1.81 | 0.049828835 | A708Q | 3911 |
| 1.76 | 0.043121298 | L307K | 3912 |
| 1.7 | 0.03352434 | L379R + A708K + [P793] + D489S | 3913 |
| 1.7 | 0.170748704 | C477Q | 3914 |
| 1.65 | 0.051918988 | Q804A | 3915 |
| 1.64 | 0.169459451 | F399L | 3916 |
| 1.64 | 0.02984323 | L379R + A708K + [P793] + Y797L | 3917 |
| 1.64 | 0.168799771 | L379R + C477K + A708K + [P793] + G791M | 3918 |
| 1.63 | 0.035361733 | D733T | 3919 |
| 1.63 | 0.062042898 | P793Q | 3920 |
| 1.6 | 0.000928887 | A739V | 3921 |
| 1.59 | 0.208295832 | E386S | 3922 |
| 1.58 | 0.00189514 | F536S | 3923 |
| 1.57 | 0.204148363 | D387K | 3924 |
| 1.55 | 0.198137682 | E386N | 3925 |
| 1.52 | 0.000291529 | C477K | 3926 |
| 1.51 | 0.00032232 | C477R | 3927 |
| 1.49 | 0.095600844 | A739T | 3928 |
| 1.46 | 0.051799824 | S219R | 3929 |
| 1.41 | 0.000272809 | K416E & A708K | 3930 |
| 1.4 | 4.65E−05 | L379R | 3931 |
| 1.38 | 0.043395969 | E385K | 3932 |
| 1.36 | 0.000269797 | G695H | 3933 |
| 1.35 | 0.02584186 | L379R + C477K + A708K + [P793] + A739T | 3934 |
| 1.35 | 0.158192737 | E292R | 3935 |
| 1.34 | 0.184524879 | L792K | 3936 |
| 1.31 | 0.064556939 | K25R | 3937 |
| 1.31 | 0.08768015 | K975R | 3938 |
| 1.31 | 0.062237773 | V959M | 3939 |
| 1.29 | 0.092916832 | D489S | 3940 |
| 1.29 | 0.137197584 | K808S | 3941 |
| 1.28 | 0.181775511 | N952T | 3942 |
| 1.27 | 0.031730102 | K975Q | 3943 |
| 1.25 | 0.030353503 | S890R | 3944 |
| 1.23 | 0.350374014 | [P793] | 3945 |
| 1.21 | 8.61E−05 | A788W | 3946 |
| 1.21 | 0.057483618 | Q338R + A339E | 3947 |
| 1.21 | 0.116491085 | I7F | 3948 |
| 1.21 | 0.061416272 | QT945KI | 3949 |
| 1.21 | 0.091585825 | K682E | 3950 |
| 1.19 | 0.000423928 | E385A | 3951 |
| 1.19 | 0.053255444 | P793S | 3952 |
| 1.18 | 0.043774095 | E385Q | 3953 |
| 1.18 | 0.124987984 | D732N | 3954 |
| 1.17 | 0.101573595 | E292K | 3955 |
| 1.16 | 0.000245107 | S794R + Y797L | 3956 |
| 1.15 | 0.160445636 | G791M | 3957 |
| 1.14 | 0.098217225 | I303K | 3958 |
| 1.12 | 0.000275601 | \hat{ }AS793 | 3959 |
| 1.11 | 0.037923895 | S603G | 3960 |
| 1.08 | 6.48E−05 | Y797L | 3961 |
| 1.08 | 0.034990079 | A377K | 3962 |
| 1.08 | 0.059730153 | K955R | 3963 |
| 1.04 | 0.000376903 | T886K | 3964 |
| 1.03 | 0.036131932 | Q338R + A339K | 3965 |
| 1.03 | 0.031397109 | P283Q | 3966 |
| 1.01 | 0.000158685 | D600N | 3967 |
| 1.01 | 0.095937558 | S867R | 3968 |
| 1.01 | 0.079977243 | E466H | 3969 |
| 1 | 0.086320071 | E53K | 3970 |
| 0.98 | 0.123364563 | L792E | 3971 |
| 0.97 | 5.98E−05 | Q338R | 3972 |
| 0.96 | 0.059312097 | H152D | 3973 |
| 0.95 | 0.122246867 | V254G | 3974 |
| 0.94 | 0.072611815 | TT949PP | 3975 |
| 0.93 | 0.091846036 | I279F | 3976 |
| 0.93 | 0.031803852 | L897M | 3977 |
| 0.92 | 0.000288973 | K390R | 3978 |
| 0.91 | 0.000565042 | K390R | 3979 |
| 0.89 | 0.001316868 | L792G | 3980 |
| 0.89 | 0.000623156 | A739V | 3981 |
| 0.89 | 0.033874895 | R624G | 3982 |
| 0.88 | 0.103894502 | C349E | 3983 |
| 0.86 | 0.11267313 | E498K | 3984 |
| 0.85 | 0.079415017 | R388Q | 3985 |
| 0.84 | 0.000115651 | I55F | 3986 |
| 0.84 | 0.000383356 | E712Q | 3987 |
| 0.83 | 0.025220431 | E475K | 3988 |
| 0.81 | 0.000172705 | \hat{ }AS796 | 3989 |
| 0.8 | 0.111675911 | Q628E | 3990 |
| 0.79 | 0.000114918 | C479A | 3991 |
| 0.79 | 0.001115871 | Q338E | 3992 |
| 0.78 | 0.000744903 | K25Q | 3993 |
| 0.76 | 0.000269223 | \hat{ }AS795 | 3994 |
| 0.74 | 0.000437653 | L481Q | 3995 |
| 0.73 | 0.0001773 | E552K | 3996 |
| 0.72 | 0.000298273 | T153I | 3997 |
| 0.69 | 0.000273628 | N880D | 3998 |
| 0.68 | 0.000192096 | G791M | 3999 |
| 0.67 | 0.000295463 | C233S | 4000 |
| 0.67 | 0.000123996 | Q367K + I425S | 4001 |
| 0.67 | 0.000188025 | L685I | 4002 |
| 0.66 | 0.000169478 | K942Q | 4003 |
| 0.66 | 0.000374718 | N47D | 4004 |
| 0.66 | 0.138212411 | V635M | 4005 |
| 0.64 | 0.067027049 | G27D | 4006 |
| 0.63 | 0.000195863 | C479L | 4007 |
| 0.63 | 0.000439659 | [P793] + P793AS | 4008 |
| 0.62 | 0.000211625 | T72S | 4009 |
| 0.62 | 0.000217614 | S270W | 4010 |
| 0.61 | 0.00019414 | A751S | 4011 |
| 0.6 | 0.066962306 | Q102R | 4012 |
| 0.57 | 0.052391074 | M734K | 4013 |
| 0.53 | 0.000621789 | \hat{ }AS795 | 4014 |
| 0.53 | 0.145184217 | F189Y | 4015 |
| 0.5 | 0.038258832 | W885R | 4016 |
| 0.48 | 0.000505099 | A636D | 4017 |
| 0.47 | 0.030480379 | K416E | 4018 |
| 0.46 | 0.428767546 | R693I | 4019 |
| 0.45 | 0.593145404 | m29R | 4020 |
| 0.45 | 0.144374311 | T946P | 4021 |
| 0.44 | 0.000253022 | \hat{ }L889 | 4022 |
| 0.42 | 0.000171566 | E121D | 4023 |
| 0.37 | 0.042821047 | P224K | 4024 |
| 0.37 | 0.683382544 | K767R | 4025 |
| 0.36 | 0.026543344 | E480K | 4026 |
| 0.34 | 0.000998618 | I546V | 4027 |
| 0.27 | 0.164274898 | K188E | 4028 |
| 0.22 | 0.00106697 | Y789T | 4029 |
| 0.21 | 0.000512104 | F495S | 4030 |
| 0.18 | 0.023184407 | m29E | 4031 |
| 0.18 | 0.096249035 | A238T | 4032 |
| 0.17 | 0.000141352 | d231N | 4033 |
| 0.17 | 9.49E−05 | I199F | 4034 |
| 0.17 | 0.031218317 | N737S | 4035 |
| 0.16 | 3.87E−05 | \hat{ }G661A | 4036 |
| 0.12 | 4.08E−05 | K460N | 4037 |
| 0.08 | 0.000897639 | k210R | 4038 |
| 0.08 | 3.47E−05 | G492P | 4039 |
| 0.07 | 0.000266253 | R591I | 4040 |
| 0.04 | 6.41E−05 | \hat{ }T696 | 4041 |
| 0.03 | 0.022802297 | S507G + G508R | 4042 |
| 0.02 | 0.028138538 | Y723N | 4043 |
| −0.01 | 0.000529731 | \hat{ }P696 | 4044 |
| −0.01 | 0.038340599 | g226R | 4045 |
| −0.02 | 0.052026759 | W974G | 4046 |
| −0.04 | 0.000176981 | \hat{ }M773 | 4047 |
| −0.04 | 0.07902452 | H435R | 4048 |
| −0.06 | 0.069143378 | A724S | 4049 |
| −0.06 | 0.060317972 | T704K | 4050 |
| −0.06 | 0.017155351 | Y966N | 4051 |
| −0.08 | 0.036299549 | H164R | 4052 |
| −0.15 | 0.032952207 | F556I, D646A, G695D, A751S, A820P | 4053 |
| −0.17 | 0.04149111 | D659H | 4054 |
| −0.21 | 0.064777446 | T806V | 4055 |
| −0.24 | 0.001280151 | Y789D | 4056 |
| −0.31 | 0.05332531 | C479A | 4057 |
| −0.35 | 0.066448437 | L212P | 4058 |

Norm = Normalized Editing Activity (avg, 2 spacer n = 6); SD = Standard Deviation; Mut = Mutation Descriptor.
Mutations are relative to SEQ ID NO: 2.
[ ] indicate deletions, and (\hat{ }) indicate insertions at the specified positions of SEQ ID NO: 2.
E6 and E7 spacers were used, and the data are the average of N = 6 replicates.
St. Dev. = Standard Deviation.
Editing activity was normalized to that of the reference CasX protein of SEQ ID NO: 2.

[0355] Selected CasX variant proteins from the DME screen and CasX variant proteins comprising combinations of mutations were assayed for their ability to disrupt via cleavage and indel formation GFP reporter expression. CasX variant proteins were assayed with two targets, with 6 replicates. FIG. 10 shows the fold improvement in activity over the reference CasX protein of SEQ ID NO: 2 of select variants carrying single mutations, assayed with the reference sgRNA scaffold of SEQ ID NO: 5.

[0356] FIG. 11 shows that combining single mutations, such as those shown in FIG. 10, can produce CasX variant proteins, that can improve editing efficiency by greater than two-fold. The most improved CasX variant proteins, which combine 3 or 4 individual mutations, exhibit activity comparable to Staphylococcus aureus Cas9 (SaCas9) which is used in the clinic (Maeder et al. 2019, Nature Medicine 25(2):229-233).

[0357] FIGS. 12A-12B shows that CasX variant proteins, when combined with select sgRNA variants, can achieve even greater improvements in editing efficiency. For example, a protein variant comprising L379K and A708K substitutions, and a P793 deletion of SEQ ID NO: 2, when combined with the truncated stem loop T10C sgRNA variant more than doubles the fraction of disrupted cells.

### Example 6: RNP Assembly

[0358] Purified wild-type and RNP of CasX and single guide RNA (sgRNA) were either prepared immediately before experiments or prepared and snap-frozen in liquid nitrogen and stored at −80° C. for later use. To prepare the RNP complexes, the CasX protein was incubated with sgRNA at 1:1.2 molar ratio. Briefly, sgRNA was added to Buffer #1 (25 mM NaPi, 150 mM NaCl, 200 mM trehalose, 1 mM MgCl2), then the CasX was added to the sgRNA solution, slowly with swirling, and incubated at 37° C. for 10 min to form RNP complexes. RNP complexes were filtered before use through a 0.22 μm Costar 8160 filters that were pre-wet with 200111 Buffer #1. If needed, the RNP sample was concentrated with a 0.5 ml Ultra 100-Kd cutoff filter, (Millipore part #UFC510096), until the desired volume was obtained. Formation of competent RNP was assessed as described in Example 12.

### Example 7: Assessing Binding Affinity to the Guide RNA

[0359] Purified wild-type and improved CasX will be incubated with synthetic single-guide RNA containing a 3′ Cy7.5 moiety in low-salt buffer containing magnesium chloride as well as heparin to prevent non-specific binding and aggregation. The sgRNA will be maintained at a concentration of 10 pM, while the protein will be titrated from 1 pM to 100 μM in separate binding reactions. After allowing the reaction to come to equilibrium, the samples will be run through a vacuum manifold filter-binding assay with a nitrocellulose membrane and a positively charged nylon membrane, which bind protein and nucleic acid, respectively. The membranes will be imaged to identify guide RNA, and the fraction of bound vs unbound RNA will be determined by the amount of fluorescence on the nitrocellulose vs nylon membrane for each protein concentration to calculate the dissociation constant of the protein-sgRNA complex. The experiment will also be carried out with improved variants of the sgRNA to determine if these mutations also affect the affinity of the guide for the wild-type and mutant proteins. We will also perform electromobility shift assays to qualitatively compare to the filter-binding assay and confirm that soluble binding, rather than aggregation, is the primary contributor to protein-RNA association.

### Example 8: Assessing Binding Affinity to the Target DNA

[0360] Purified wild-type and improved CasX will be complexed with single-guide RNA bearing a targeting sequence complementary to the target nucleic acid. The RNP complex will be incubated with double-stranded target DNA containing a PAM and the appropriate target nucleic acid sequence with a 5′ Cy7.5 label on the target strand in low-salt buffer containing magnesium chloride as well as heparin to prevent non-specific binding and aggregation. The target DNA will be maintained at a concentration of 1 nM, while the RNP will be titrated from 1 pM to 100 μM in separate binding reactions. After allowing the reaction to come to equilibrium, the samples will be run on a native 5% polyacrylamide gel to separate bound and unbound target DNA. The gel will be imaged to identify mobility shifts of the target DNA, and the fraction of bound vs unbound DNA will be calculated for each protein concentration to determine the dissociation constant of the RNP-target DNA ternary complex.

### Example 9: Assessing Differential PAM Recognition In Vitro

[0361] Purified wild-type and engineered CasX variants will be complexed with single-guide RNA bearing a fixed targeting sequence. The RNP complexes will be added to buffer containing MgCl2 at a final concentration of 100 nM and incubated with 5′ Cy7.5-labeled double-stranded target DNA at a concentration of 10 nM. Separate reactions will be carried out with different DNA substrates containing different PAMs adjacent to the target nucleic acid sequence. Aliquots of the reactions will be taken at fixed time points and quenched by the addition of an equal volume of 50 mM EDTA and 95% formamide. The samples will be run on a denaturing polyacrylamide gel to separate cleaved and uncleaved DNA substrates. The results will be visualized and the rate of cleavage of the non-canonical PAMs by the CasX variants will be determined.

### Example 10: Assessing Nuclease Activity for Double-Strand Cleavage

[0362] Purified wild-type and engineered CasX variants will be complexed with single-guide RNA bearing a fixed PM22 targeting sequence. The RNP complexes will be added to buffer containing MgCl2 at a final concentration of 100 nM and incubated with double-stranded target DNA with a 5′ Cy7.5 label on either the target or non-target strand at a concentration of 10 nM. Aliquots of the reactions will be taken at fixed time points and quenched by the addition of an equal volume of 50 mM EDTA and 95% formamide. The samples will be run on a denaturing polyacrylamide gel to separate cleaved and uncleaved DNA substrates. The results will be visualized and the cleavage rates of the target and non-target strands by the wild-type and engineered variants will be determined. To more clearly differentiate between changes to target binding vs the rate of catalysis of the nucleolytic reaction itself, the protein concentration will be titrated over a range from 10 nM to 1 uM and cleavage rates will be determined at each concentration to generate a pseudo-Michaelis-Menten fit and determine the kcat* and KM*. Changes to KM* are indicative of altered binding, while changes to kcat* are indicative of altered catalysis.

### Example 11: Assessing Target Strand Loading for Cleavage

[0363] Purified wild-type and engineered CasX 119 will be complexed with single-guide RNA bearing a fixed PM22 targeting sequence. The RNP complexes will be added to buffer containing MgCl2 at a final concentration of 100 nM and incubated with double-stranded target DNA with a 5′ Cy7.5 label on the target strand and a 5′ Cy5 label on the non-target strand at a concentration of 10 nM. Aliquots of the reactions will be taken at fixed time points and quenched by the addition of an equal volume of 50 mM EDTA and 95% formamide. The samples will be run on a denaturing polyacrylamide gel to separate cleaved and uncleaved DNA substrates. The results will be visualized and the cleavage rates of both strands by the variants will be determined. Changes to the rate of target strand cleavage but not non-target strand cleavage would be indicative of improvements to the loading of the target strand in the active site for cleavage. This activity could be further isolated by repeating the assay with a dsDNA substrate that has a gap on the non-target strand, mimicking a pre-cleaved substrate. Improved cleavage of the non-target strand in this context would give further evidence that the loading and cleavage of the target strand, rather than an upstream step, has been improved.

### Example 12: CasX:gNA In Vitro Cleavage Assays

[0364] 1. Determining Cleavage-competent Fraction

[0365] The ability of CasX variants to form active RNP compared to reference CasX was determined using an in vitro cleavage assay. The beta-2 microglobulin (B2M) 7.37 target for the cleavage assay was created as follows. DNA oligos with the sequence TGAAGCTGACAGCATTCGGGCCGAGATGTCTCGCTCCGTGGCCTTAGCTGTGCTCGC GCT (SEQ ID NO: 4059; non-target strand, NTS) and TGAAGCTGACAGCATTCGGGCCGAGATGTCTCGCTCCGTGGCCTTAGCTGTGCTCGC GCT (SEQ ID NO: 4060; target strand, TS) were purchased with 5′ fluorescent labels (LI-COR IRDye 700 and 800, respectively). dsDNA targets were formed by mixing the oligos in a 1:1 ratio in 1× cleavage buffer (20 mM Tris HCl pH 7.5, 150 mM NaCl, 1 mM TCEP, 5% glycerol, 10 mM MgCl₂), heating to 95° C. for 10 minutes, and allowing the solution to cool to room temperature.

[0366] CasX RNPs were reconstituted with the indicated CasX and guides (see graphs) at a final concentration of 1 μM with 1.5-fold excess of the indicated guide in 1× cleavage buffer (20 mM Tris HCl pH 7.5, 150 mM NaCl, 1 mM TCEP, 5% glycerol, 10 mM MgCl2) at 37° C. for 10 min before being moved to ice until ready to use. The 7.37 target was used, along with sgRNAs having spacers complementary to the 7.37 target.

[0367] Cleavage reactions were prepared with final RNP concentrations of 100 nM and a final target concentration of 100 nM. Reactions were carried out at 37° C. and initiated by the addition of the 7.37 target DNA. Aliquots were taken at 5, 10, 30, 60, and 120 minutes and quenched by adding to 95% formamide, 20 mM EDTA. Samples were denatured by heating at 95° C. for 10 minutes and run on a 10% urea-PAGE gel. The gels were imaged with a LI-COR Odyssey CLx and quantified using the LI-COR Image Studio software. The resulting data were plotted and analyzed using Prism. We assumed that CasX acts as essentially as a single-turnover enzyme under the assayed conditions, as indicated by the observation that sub-stoichiometric amounts of enzyme fail to cleave a greater-than-stoichiometric amount of target even under extended time-scales and instead approach a plateau that scales with the amount of enzyme present. Thus, the fraction of target cleaved over long time-scales by an equimolar amount of RNP is indicative of what fraction of the RNP is properly formed and active for cleavage. The cleavage traces were fit with a biphasic rate model, as the cleavage reaction clearly deviates from monophasic under this concentration regime, and the plateau was determined for each of three independent replicates. The mean and standard deviation were calculated to determine the active fraction (Table 30). The graphs are shown in FIG. 24.

[0368] Apparent active (competent) fractions were determined for RNPs formed for CasX2+guide 174+7.37 spacer, CasX119+guide 174+7.37 spacer, and CasX459+guide 174+7.37 spacer. The determined active fractions are shown in Table 30. Both CasX variants had higher active fractions than the wild-type CasX2, indicating that the engineered CasX variants form significantly more active and stable RNP with the identical guide under tested conditions compared to wild-type CasX. This may be due to an increased affinity for the sgRNA, increased stability or solubility in the presence of sgRNA, or greater stability of a cleavage-competent conformation of the engineered CasX:sgRNA complex. An increase in solubility of the RNP was indicated by a notable decrease in the observed precipitate formed when CasX457 was added to the sgRNA compared to CasX2. Cleavage-competent fractions were also determined for CasX2.2.7.37, CasX2.32.7.37, CasX2.64.7.37, and CasX2.174.7.37 to be 16±3%, 13±3%, 5±2%, and 22±5%, as shown in FIG. 25.

[0369] The data indicate that both CasX variants and sgRNA variants are able to form a higher degree of active RNP with guide RNA compare to wild-type CasX and wild-type sgRNA. 2. In vitro Cleavage Assays—Determining kcleave for CasX variants compared to wild-type reference CasX

[0370] The apparent cleavage rates of CasX variants 119 and 457 compared to wild-type reference CasX were determined using an in vitro fluorescent assay for cleavage of the target 7.37.

[0371] CasX RNPs were reconstituted with the indicated CasX (see FIG. 26) at a final concentration of 1 μM with 1.5-fold excess of the indicated guide in 1× cleavage buffer (20 mM Tris HCl pH 7.5, 150 mM NaCl, 1 mM TCEP, 5% glycerol, 10 mM MgCl2) at 37° C. for 10 min before being moved to ice until ready to use. Cleavage reactions were set up with a final RNP concentration of 200 nM and a final target concentration of 10 nM. Reactions were carried out at 37° C. and initiated by the addition of the target DNA. Aliquots were taken at 0.25, 0.5, 1, 2, 5, and 10 minutes and quenched by adding to 95% formamide, 20 mM EDTA. Samples were denatured by heating at 95° C. for 10 minutes and run on a 10% urea-PAGE gel. The gels were imaged with a LI-COR Odyssey CLx and quantified using the LI-COR Image Studio software. The resulting data were plotted and analyzed using Prism, and the apparent first-order rate constant of non-target strand cleavage (kcleave) was determined for each CasX:sgRNA combination replicate individually. The mean and standard deviation of three replicates with independent fits are presented in Table 30, and the cleavage traces are shown in FIG. 25.

[0372] Apparent cleavage rate constants were determined for wild-type CasX2, and CasX variants 119 and 457 with guide 174 and spacer 7.37 utilized in each assay. Under the assayed conditions, the kcleave of CasX2, CasX119, and CasX457 were 0.51±0.01 min-1, 6.29±2.11 min-1, and 3.01±0.90 min-1 (mean±SD), respectively (see Table 30 and FIG. 26). Both CasX variants had improved cleavage rates relative to the wild-type CasX2, though notably CasX119 has a higher cleavage rate under tested conditions than CasX457. As demonstrated by the active fraction determination, however, CasX457 more efficiently forms stable and active RNP complexes, allowing different variants to be used depending on whether the rate of cutting or the amount of active holoenzyme is more important for the desired outcome.

[0373] The data indicate that the CasX variants have a higher level of activity, with Kcleave rates approximately 5 to 10-fold higher compared to wild-type CasX2. 3. In vitro Cleavage Assays: Comparison of guide variants to wild-type guides

[0374] Cleavage assays were also performed with wild-type reference CasX2 and reference guide 2 compared to guide variants 32, 64, and 174 to determine whether the variants improved cleavage. The experiments were performed as described above. As many of the resulting RNPs did not approach full cleavage of the target in the time tested, we determined initial reaction velocities (VO) rather than first-order rate constants. The first two timepoints (15 and 30 seconds) were fit with a line for each CasX:sgRNA combination and replicate. The mean and standard deviation of the slope for three replicates were determined.

[0375] Under the assayed conditions, the VO for CasX2 with guides 2, 32, 64, and 174 were 20.4±1.4 nM/min, 18.4±2.4 nM/min, 7.8±1.8 nM/min, and 49.3±1.4 nM/min (see Table 30 and FIG. 27). Guide 174 showed substantial improvement in the cleavage rate of the resulting RNP (˜2.5-fold relative to 2, see FIG. 28), while guides 32 and 64 performed similar to or worse than guide 2. Notably, guide 64 supports a cleavage rate lower than that of guide 2 but performs much better in vivo (data not shown). Some of the sequence alterations to generate guide 64 likely improve in vivo transcription at the cost of a nucleotide involved in triplex formation. Improved expression of guide 64 likely explains its improved activity in vivo, while its reduced stability may lead to improper folding in vitro.

TABLE 30
Results of cleavage and RNP formation assays

| RNP | | Initial | Competent |
|---|---|---|---|
| Construct | k_{cleave}* | velocity* | fraction |
| 2.2.7.37 | | 20.4 ± 1.4 nM/min | 16 ± 3% |
| 2.32.7.37 | | 18.4 ± 2.4 nM/min | 13 ± 3% |
| 2.64.7.37 | | 7.8 ± 1.8 nM/min | 5 ± 2% |
| 2.174.7.37 | 0.51 ± 0.01 min⁻¹ | 49.3 ± 1.4 nM/min | 22 ± 5% |
| 119.174.7.37 | 6.29 ± 2.11 min⁻¹ | | 35 ± 6% |
| 457.174.7.37 | 3.01 ± 0.90 min⁻¹ | | 53 ± 7% |

*Mean and standard deviation

### Example 13: CasX Variant Proteins can Affect PAM Specificity

[0376] The purpose of the experiment was to demonstrate the ability of CasX variant 2 (SEQ ID NO:2), and scaffold variant 2 (SEQ ID NO:5), to edit target gene sequences at ATCN, CTCN, and TTCN PAMs in a GFP gene. ATCN, CTCN, and TTCN spacers in the GFP gene were chosen based on PAM availability without prior knowledge of potential activity.

[0377] To facilitate assessment of editing outcomes, HEK293T-GFP reporter cell line was first generated by knocking into HEK293T cells a transgene cassette that constitutively. expresses GFP. The modified cells were expanded by serial passage every 3-5 days and maintained in Fibroblast (FB) medium, consisting of Dulbecco's Modified Eagle Medium (DMEM; Corning Cellgro, #10-013-CV) supplemented with 10% fetal bovine serum (FBS; Seradigm, #1500-500), and 100 Units/mL penicillin and 100 mg/mL streptomycin (100×-Pen-Strep; GIBCO #15140-122), and can additionally include sodium pyruvate (100×, Thermofisher #11360070), non-essential amino acids (100× Thermofisher #11140050), HEPES buffer (100× Thermofisher #15630080), and 2-mercaptoethanol (1000× Thermofisher #21985023). The cells were incubated at 37° C. and 5% CO2. After 1-2 weeks, GFP+ cells were bulk sorted into FB medium. The reporter lines were expanded by serial passage every 3-5 days and maintained in FB medium in an incubator at 37° C. and 5% CO2. Clonal cell lines were generated by a limiting dilution method.

[0378] HEK293T-GFP reporter cells, constructed using cell line generation methods described above were used for this experiment. Cells were seeded at 20-40k cells/well in a 96 well plate in 100 μL of FB medium and cultured in a 37*C incubator with 5% CO2. The following day, cells were transfected at ˜75% confluence using lipofectamine 3000 and manufacturer recommended protocols. Plasmid DNA encoding CasX and guide construct (e.g., see table for sequences) were used to transfect cells at 100-400 ng/well, using 3 wells per construct as replicates. A non-targeting plasmid construct was used as a negative control. Cells were selected for successful transfection with puromycin at 0.3-3 μg/ml for 24-48 hours followed by recovery in FB medium. Edited cells were analyzed by flow cytometry 5 days after transduction. Briefly, cells were sequentially gated for live cells, single cells, and fraction of GFP-negative cells.

### Results:

[0379] The graph in FIG. 15 shows the results of flow cytometry analysis of Cas-mediated editing at the GFP locus in HEK293T-GFP cells 5 days post-transfection. Each data point is an average measurement of 3 replicates for an individual spacer. Reference CasX reference protein (SEQ ID NO: 2) and gRNA (SEQ ID NO: 5) RNP complexes showed a clear preference for TTC PAM (FIG. 15). This served as a baseline for CasX protein and sgRNA variants that altered specificity for the PAM sequence. FIG. 16 shows that select CasX variant proteins can edit both non-canonical and canonical PAM sequences more efficiently than the reference CasX protein of SEQ ID NO: 2 when assayed with various PAM and spacer sequences in HEK293 cells. The construct with non-targeting spacer resulted in no editing (data not shown). This example demonstrates that, under the conditions of the assay, CasX with appropriate guides can edit at target sequences with ATCN, CTCN and TTCN PAMs in HEK293T-GFP reporter cells, and that improved CasX variants increase editing activity at both canonical and non-canonical PAMs.

### Example 14: Reference Planctomycetes CasX RNPs are Highly Specific

[0380] Reference CasX RNP complexes were assayed for their ability to cleave target sequences with 1-4 mutations, with results shown in FIGS. 17A-17F. Reference Planctomycetes CasX RNPs were found to be highly specific and exhibited fewer off-target effects than SpCas9 and SauCas9.

### Example 15: Editing of gene targets PCSK9, PMP22, TRAC, SOD1, B2M and HTT

[0381] The purpose of this study was to evaluate the ability of the CasX variant 119 and gNA variant 174 to edit nucleic acid sequences in six gene targets.

### Materials and Methods

[0382] Spacers for all targets except B2M and SOD1 were designed in an unbiased manner based on PAM requirements (TTC or CTC) to target a desired locus of interest. Spacers targeting B2M and SOD1 had been previously identified within targeted exons via lentiviral spacer screens carried out for these genes. Designed spacers for the other targets were ordered from Integrated DNA Technologies (IDT) as single-stranded DNA (ssDNA) oligo pairs. ssDNA spacer pairs were annealed together and cloned via Golden Gate cloning into a base mammalian-expression plasmid construct that contains the following components: codon optimized Cas X 119 protein+NLS under an EF1A promoter, guide scaffold 174 under a U6 promoter, carbenicillin and puromycin resistance genes. Assembled products were transformed into chemically-competent E. coli, plated on Lb-Agar plates (LB: Teknova Cat #L9315, Agar: Quartzy Cat #214510) containing carbenicillin and incubated at 37° C. Individual colonies were picked and miniprepped using Qiagen Qiaprep spin Miniprep Kit (Qiagen Cat #27104) following the manufacturer's protocol. The resulting plasmids were sequenced through the guide scaffold region via Sanger sequencing (Quintara Biosciences) to ensure correct ligation.

[0383] HEK 293T cells were grown in Dulbecco's Modified Eagle Medium (DMEM; Corning Cellgro, #10-013-CV) supplemented with 10% fetal bovine serum (FBS; Seradigm, #1500-500), 100 Units/ml penicillin and 100 mg/ml streptomycin (100×-Pen-Strep; GIBCO #15140-122), sodium pyruvate (100×, Thermofisher #11360070), non-essential amino acids (100× Thermofisher #11140050), HEPES buffer (100× Thermofisher #15630080), and 2-mercaptoethanol (1000× Thermofisher #21985023). Cells were passed every 3-5 days using Tryp1E and maintained in an incubator at 37° C. and 5% CO2.

[0384] On day 0, HEK293T cells were seeded in 96-well, flat-bottom plates at 30k cells/well. On day 1, cells were transfected with 100 ng plasmid DNA using Lipofectamine 3000 according to the manufacturer's protocol. On day 2, cells were switched to FB medium containing puromycin. On day 3, this media was replaced with fresh FB medium containing puromycin. The protocol after this point diverged depending on the gene of interest. Day 4 for PCSK9, PMP22, and TRAC: cells were verified to have completed selection and switched to FB medium without puromycin. Day 4 for B2M, SOD1, and HTT: cells were verified to have completed selection and passed 1:3 using Tryp1E into new plates containing FB medium without puromycin. Day 7 for PCSK9, PMP22, and TRAC: cells were lifted from the plate, washed in dPBS, counted, and resuspended in Quick Extract (Lucigen, QE09050) at 10,000 cells/μ1. Genomic DNA was extracted according to the manufacturer's protocol and stored at −20° C. Day 7 for B2M, SOD1, and HTT: cells were lifted from the plate, washed in dPBS, and genomic DNA was extracted with the Quick-DNA Miniprep Plus Kit (Zymo, D4068) according to the manufacturer's protocol and stored at −20° C.

[0385] NGS Analysis: Editing in cells from each experimental sample was assayed using next generation sequencing (NGS) analysis. All PCRs were carried out using the KAPA HiFi HotStart ReadyMix PCR Kit (KR0370). The template for genomic DNA sample PCR was 5 μl of genomic DNA in QE at 10k cells/μL for PCSK9, PMP22, and TRAC. The template for genomic DNA sample PCR was 400 ng of genomic DNA in water for B2M, SOD1, and HTT. Primers were designed specific to the target genomic location of interest to form a target amplicon. These primers contain additional sequence at the 5′ ends to introduce Illumina read and 2 sequences. Further, they contain a 7 nt randomer sequence that functions as a unique molecular identifier (UMI). Quality and quantification of the amplicon was assessed using a Fragment Analyzer DNA analyzer kit (Agilent, dsDNA 35-1500 bp). Amplicons were sequenced on the Illumina Miseq according to the manufacturer's instructions. Resultant sequencing reads were aligned to a reference sequence and analyzed for indels. Samples with editing that did not align to the estimated cut location or with unexpected alleles in the spacer region were discarded.

### Results

[0386] In order to validate the editing effected by the CasX:gNA 119.174 at a variety of genetic loci, a clonal plasmid transfection experiment was performed in HEK 293T cells. Multiple spacers (Table 31) were designed and cloned into an expression plasmid encoding the CasX 119 nuclease and guide 174 scaffold. HEK 293T cells were transfected with plasmid DNA, selected with puromycin, and harvested for genomic DNA six days post-transfection. Genomic DNA was analyzed via next generation sequencing (NGS) and aligned to a reference DNA sequence for analysis of insertions or deletions (indels). CasX:gNA 119.174 was able to efficiently generate indels across the 6 target genes, as shown in FIGS. 29 and 30. Indel rates varied between spacers, but median editing rates were consistently at 60% or higher, and in some cases, indel rates as high as 91% were observed. Additionally, spacers with non-canonical CTC PAMs were demonstrated to be able to generate indels with all tested target genes (FIG. 31).

[0387] The results demonstrate that the CasX variant 119 and gNA variant 174 can consistently and efficiently generate indels at a wide variety of genetic loci in human cells. The unbiased selection of many of the spacers used in the assays shows the overall effectiveness of the 119.174 RNP molecules to edit genetic loci, while the ability to target to spacers with both a TTC and a CTC PAM demonstrates its increased versatility compared to reference CasX that edit only with the TTC PAM.

TABLE 31
Spacer sequences targeting each genetic locus.

| | | | | SEQ |
|---|---|---|---|---|
| | | | | ID |
| Gene | Spacer | PAM | Spacer Sequence | NO |
| PCSK9 | 6.1 | TTC | GAGGAGGACGGCCTGGCCGA | 4061 |
| PCSK9 | 6.2 | TTC | ACCGCTGCGCCAAGGTGCGG | 4062 |
| PCSK9 | 6.4 | TTC | GCCAGGCCGTCCTCCTCGGA | 4063 |
| PCSK9 | 6.5 | TTC | GTGCTCGGGTGCTTCGGCCA | 4064 |
| PCSK9 | 6.3 | TTC | ATGGCCTTCTTCCTGGCTTC | 4065 |
| PCSK9 | 6.6 | TTC | GCACCACCACGTAGGTGCCA | 4066 |
| PCSK9 | 6.7 | TTC | TCCTGGCTTCCTGGTGAAGA | 4067 |
| PCSK9 | 6.8 | TTC | TGGCTTCCTGGTGAAGATGA | 4068 |
| PCSK9 | 6.9 | TTC | CCAGGAAGCCAGGAAGAAG | 4069 |
| | | | G | |
| PCSK9 | 6.10 | TTC | TCCTTGCATGGGGCCAGGAT | 4070 |
| PMP22 | 18.16 | TTC | GGCGGCAAGTTCTGCTCAGC | 4071 |
| PMP22 | 18.17 | TTC | TCTCCACGATCGTCAGCGTG | 4072 |
| PMP22 | 18.18 | CTC | ACGATCGTCAGCGTGAGTGC | 4073 |
| PMP22 | 18.1 | TTC | CTCTAGCAATGGATCGTGGG | 4074 |
| TRAC | 15.3 | TTC | CAAACAAATGTGTCACAAAG | 4075 |
| TRAC | 15.4 | TTC | GATGTGTATATCACAGACAA | 4076 |
| TRAC | 15.5 | TTC | GGAATAATGCTGTTGTTGAA | 4077 |
| TRAC | 15.9 | TTC | AAATCCAGTGACAAGTCTGT | 4078 |
| TRAC | 15.10 | TTC | AGGCCACAGCACTGTTGCTC | 4079 |
| TRAC | 15.21 | TTC | AGAAGACACCTTCTTCCCCA | 4080 |
| TRAC | 15.22 | TTC | TCCCCAGCCCAGGTAAGGGC | 4081 |
| TRAC | 15.23 | TTC | CCAGCCCAGGTAAGGGCAGC | 4082 |
| HTT | 5.1 | TTC | AGTCCCTCAAGTCCTTCCAG | 4083 |
| HTT | 5.2 | TTC | AGCAGCAGCAGCAGCAGCA | 4084 |
| | | | G | |
| HTT | 5.3 | TTC | TCAGCCGCCGCCGCAGGCAC | 4085 |
| HTT | 5.4 | TTC | AGGGTCGCCATGGCGGTCTC | 4086 |
| HTT | 5.5 | TTC | TCAGCTTTTCCAGGGTCGCC | 4087 |
| HTT | 5.7 | CTC | GCCGCAGCCGCCCCCGCCGC | 4088 |
| HTT | 5.8 | CTC | GCCACAGCCGGGCCGGGTGG | 4089 |
| HTT | 5.9 | CTC | TCAGCCACAGCCGGGCCGGG | 4090 |
| HTT | 5.10 | CTC | CGGTCGGTGCAGCGGCTCCT | 4091 |
| SOD1 | 8.56 | TTC | CCACACCTTCACTGGTCCAT | 4092 |
| SOD1 | 8.57 | TTC | TAAAGGAAAGTAATGGACCA | 4093 |
| SOD1 | 8.58 | TTC | CTGGTCCATTACTTTCCTTT | 4094 |
| SOD1 | 8.2 | TTC | ATGTTCATGAGTTTGGAGAT | 4095 |
| SOD1 | 8.68 | TTC | TGAGTTTGGAGATAATACAG | 4096 |
| SOD1 | 8.59 | TTC | ATAGACACATCGGCCACACC | 4097 |
| SOD1 | 8.47 | TTC | TTATTAGGCATGTTGGAGAC | 4098 |
| SOD1 | 8.62 | CTC | CAGGAGACCATTGCATCATT | 4099 |
| B2M | 7.120 | TTC | GGCCTGGAGGCTATCCAGCG | 4100 |
| B2M | 7.37 | TTC | GGCCGAGATGTCTCGCTCCG | 27 |
| B2M | 7.43 | CTC | AGGCCAGAAAGAGAGAGTA | 28 |
| | | | G | |
| B2M | 7.119 | CTC | CGCTGGATAGCCTCCAGGCC | 4101 |
| B2M | 7.14 | TTC | TGAAGCTGACAGCATTCGGG | 25 |

### Example 16: Design and Evaluation of Improved CasX Variants by Deep Mutational Evolution

[0388] The purpose of the experiments was to identify and engineer novel CasX variant proteins with enhanced genome editing efficiency relative to wild-type CasX. To cleave DNA efficiently in living cells, the CasX protein must efficiently perform the following functions: i) form and stabilize the R-loop structure consisting of a targeting guide RNA annealed to a complementary genomic target site in a DNA:RNA hybrid; and ii) position an active nuclease domain to cleave both strands of the DNA at the target sequence. These two functions can each be enhanced by altering the biochemical or structural properties of the protein, specifically by introducing amino acid mutations or exchanging protein domains in an additive or combinatorial fashion.

[0389] To construct CasX variant proteins with improved properties, an overall approach was chosen in which bacterial assays and hypothesis-driven approaches were first used to identify candidate mutations to enhance particular functions, after which increasingly stringent human genome editing assays were used in a stepwise manner to rationally combine cooperatively function-enhancing mutations in order to identify CasX variants with enhanced editing properties.

### Materials and Methods:

### Cloning and Media

[0390] Restriction enzymes, PCR reagents, and cloning strains of E. coli were obtained from New England Biolabs. All molecular biology and cloning procedures were performed according to the manufacturer's instructions. PCR was performed using Q5 polymerase unless otherwise specified. All bacterial culture growth was performed in 2XYT media (Teknova) unless otherwise specified. Standard plasmid cloning was performed in Turbo® E. coli unless otherwise specified. Standard final concentrations of the following antibiotics were used where indicated: carbenicillin: 100 μg/mL; kanamycin: 60 μg/mL; chloramphenicol: 25 μg/mL.

### Molecular Biology of Protein Library Construction

[0391] Four libraries of CasX variant proteins were constructed using plasmid recombineering in E. coli strain EcNR2 (Addgene ID: 26931), and the overall approach to protein mutagenesis was termed Deep Mutational Evolution (DME), which is schematically shown in FIG. 32. Three libraries were constructed corresponding to each of three cleavage-inactivating mutations made to the reference CasX protein open reading frame of Planctomycetes, SEQ 1D NO:2 (“STX2”), rendering the CasX catalytically dead (dCasX). These three mutations are referred to as D1 (with a D659A substitution), D2 (with a E756A substitution), or D3 (with a D922A substitution). A fourth library was composed of all three mutations in combination, referred to as DDD (D659A; E756A; D922A substitutions). These libraries were constructed by introducing desired mutations to each of the four starting plasmids. Briefly, an oligonucleotide library was obtained from Twist Biosciences and prepared for recombineering (see below). A final volume of 50 μL of 1 μM oligonucleotides, plus 10 ng of pSTX1 encoding the dCasX open reading frame (composed of either D1, D2, or D3) was electroporated into 50 μL of induced, washed, and concentrated EcNR2 using a 1 mm electroporation cuvette (BioRad GenePulser). A Harvard Apparatus ECM 630 Electroporation System was used with settings 1800 kV, 200 Ω, 25 μF. Three replicate electroporations were performed, then individually allowed to recover at 30° C. for 2 hr in 1 mL of SOC (Teknova) without antibiotic. These recovered cultures were titered on LB plates with kanamycin to determine the library size. 2XYT media and kanamycin was then added to a final volume of 6 mL and grown for a further 16 hours at 30° C. Cultures were miniprepped (QIAprep Spin Miniprep Kit) and the three replicates were then combined, completing a round of plasmid recombineering. A second round of recombineering was then performed, using the resulting miniprepped plasmid from round 1 as the input plasmid.

[0392] Oligo library synthesis and maturation: A total of 57751 unique oligonucleotide sequences designed to result in either amino acid insertion, substitution, or deletion at each codon position along the STX 2 open reading frame were synthesized by Twist Biosciences, among which were included so-called ‘recombineering oligos’ that included one codon to represent each of the twenty standard amino acids and codons with flanking homology when encoded in the plasmid pSTX1. The oligo library included flanking 5′ and 3′ constant regions used for PCR amplification. Compatible PCR primers include oSH7: 5′AACACGTCCGTCCTAGAACT (SEQ ID NO: 4102; universal forward) and oSH8: 5′ACTTGGTTACGCTCAACACT (SEQ ID NO: 4103; universal reverse) (see reference table). The entire oligo pool was amplified as 400 individual 100 μL reactions. The protocol was optimized to produce a clean band at 164 bp. Finally, amplified oligos were digested with a restriction enzyme (to remove primer annealing sites, which would otherwise form scars during recombineering), and then cleaned, for example, with a PCR clean-up kit (to remove excess salts that may interfere with the electroporation step). Here, a 600 μL final volume BsaI restriction digest was performed, with 30 μg DNA+30 μL BsaI enzyme, which was digested for two hours at 37° C.

[0393] For DME1: after two rounds of recombineering were completed, plasmid libraries were cloned into a bacterial expression plasmid, pSTX2. This was accomplished using a BsmbI Golden Gate Cloning approach to subclone the library of STX genes into an expression compatible context, resulting in plasmid pSTX3. Libraries were transformed into Turbo® E. coli (New England Biolabs) and grown in chloramphenicol for 16 hours at 37° C., followed by miniprep the next day.

[0394] For DME2: protein libraries from DME1 were further cloned to generate a new set of three libraries for further screening and analysis. All subcloning and PCR was accomplished within the context of plasmid pSTX1. Library D1 was discontinued and libraries D2 and D3 were kept the same. A new library, DDD, was generated from libraries D2 and D3 as follows. First, libraries D2 and D3 were PCR amplified such that the Dead 1 mutation, E756A, was added to all plasmids in each library, followed by blunt ligation, transformation, and miniprep, resulting in library A (D1+D2) and library B (D1+D3). Next, another round of PCR was performed to add either mutation D3 or D2, respectively, to library A and B, generating PCR products A′ and B′. At this point, A′ and B′ were combined in equimolar amounts, then blunt ligated, transformed, and miniprepped to generate a new library, DDD, containing all three dead mutations in each plasmid.

### Bacterial CRISPR Interference (CRISPRi) Screen

[0395] A dual-color fluorescence reporter screen was implemented, using monomeric Red Fluorescent Protein (mRFP) and Superfolder Green Fluorescent Protein (sfGFP), based on Qi L S, et al. Cell 152:1173-1183 (2013). This screen was utilized to assay gene-specific transcriptional repression mediated by programmable DNA binding of the CasX system. This strain of E. coli expresses bright green and red fluorescence under standard culturing conditions or when grown as colonies on agar plates. Under a CRISPRi system, the CasX protein is expressed from an anhydrotetracycline (aTc)-inducible promoter on a plasmid containing a p15A replication origin (plasmid pSTX3; chloramphenicol resistant), and the sgRNA is expressed from a minimal constitutive promoter on a plasmid containing a ColE1 replication origin (pSTX4, non-targeting spacer, or pSTX5, GFP-targeting spacer #1; carbenicillin resistant). When the CRISPRi E. coli strain is co-transformed with both plasmids, genes targeted by the spacer in pSTX4 are repressed; in this case GFP repression is observed, the degree to which is dependent on the function of the targeting CasX protein and sgRNA. In this system, RFP fluorescence can serve as a normalizing control. Specifically, RFP fluorescence is unaltered and independent of functional CasX based CRISPRi activity. CRISPRi activity can be tuned in this system by regulating the expression of the CasX protein; here, all assays used an induction concentration of 20 nM aTc final concentration in growth media.

[0396] Libraries of CasX protein were initially screened using the above CRISPRi system. After co-transformation and recovery, libraries were either: 1) plated on LB agar plus appropriate antibiotics and titered such that individual colonies could be picked, or 2) grown for eight hours in 2XYT media with appropriate antibiotics and sorted on a MA900 flow cytometry instrument (Sony). Variants of interest were detected using either standard Sanger sequencing of picked colonies (UC Berkeley Barker Sequencing Facility) or NGS sequencing of miniprepped plasmid (Massachusetts General Hospital CCIB DNA Core Next-Generation Sequencing Service).

[0397] Plasmids were miniprepped and the protein sequence was PCR-amplified, then tagmented using a Nextera kit (Illumina) to fragment the amplicon and introduce indexing adapters for sequencing on a 150 paired end HiSeq 2500 (UC Berkeley Genomics Sequencing Lab).

Bacterial ccdB Plasmid Clearance Selection

[0398] A dual-plasmid selection system was used to assay clearance of a toxic plasmid by CasX DNA cleavage. Briefly, the arabinose-inducible plasmid pBLO63.3 expressing toxic protein ccdB results in death when transformed into E. coli strain BW25113 and grown under permissive conditions. However, growth is rescued if the plasmid is cleared successfully by dsDNA cleavage, and in particular by plasmid pSTX3 co-expressing CasX protein and a guide RNA targeting the plasmid pBLO63.3. CasX protein libraries from DME1, without the catalytically inactivating mutations D1, D2, or D3, were subcloned to plasmid pSTX3. These plasmid libraries were transformed into BW25113 carrying pBLO63.3 by electroporation (200 ng of plasmid into 50 uL of electrocompetent cells) and allowed to recover in 2 mL of SOC media at 37° C. at 200 rpm shaking for 25 minutes, after which luL of 1M IPTG was added. Growth was continued for an additional 40 minutes, after which cultures were evenly divided across a 96-well deep-well block and grown in selective media for 4.5 hrs at 37° C. or 45° C. at 750 rpm. Selective media consists of the following: 2XYT with chloramphenicol+10 mM arabinose+500 μM IPTG+2 nM aTc (concentrations final). Following growth, plasmids were miniprepped to complete one round of selection, and the resulting DNA was used as input for a subsequent round. Seven rounds of selection were performed on CasX protein libraries. CasX variant Sanger sequencing or NGS was performed as described above.

### NGS Data Analysis

[0399] Paired end reads were trimmed for adapter sequences with cutadapt (version 2.1), and aligned to the reference with bowtie2 (v2.3.4.3). The reference was the entire amplicon sequence prior to tagmentation in the Nextera protocol. Each catalytically inactive CasX variant was aligned to its respective amplicon sequence. Sequencing reads were assessed for amino acid variation from the reference sequence. In short, the read sequence and aligned reference sequence were translated (in frame), then realigned and amino acid variants were called. Reads with poor alignment or high error rates were discarded (mapq <20 and estimated error rate >4%; Estimated error rate was calculated using per-base phred quality scores). Mutations at locations of poor-quality sequencing were discarded (phred score <20). Mutations were labeled for being single substitutions, insertions, or deletions, or other higher-order mutations, or outside the protein-coding sequence of the amplicon. The number of reads that supported each set of mutations was determined. These read counts were normalized for sequencing depth (mean normalization), and read counts from technical replicates were averaged by taking the geometric mean. Enrichment was calculated within each CasX variant by averaging the enrichment for each gate.

### Molecular Biology of Variants

[0400] In order to screen variants of interest, individual variants were constructed using standard molecular biology techniques. All mutations were built on STX2 using a staging vector and Gibson cloning. To build single mutations, universal forward (5′→3′) and reverse (3′→5′) primers were designed on either end of the protein sequence that had homology to the desired backbone for screening (see Table 32). Primers to create the desired mutations were also designed (F primer and its reverse complement) and used with the universal F and R primers for amplification, thus producing two fragments. In order to add multiple mutations, additional primers with overlap were designed and more PCR fragments were produced. For example, to construct a triple mutant, four sets of F/R primers were designed. The resulting PCR fragments were gel extracted and the screening vector was digested with the appropriate restriction enzymes then gel extracted. The insert fragments and vector were then assembled using Gibson assembly master mix, transformed, and plated using appropriate LB agar+antibiotic. The clones were Sanger sequenced and correct clones were chosen.

[0401] Finally, spacer cloning was performed to target the guide RNA to a gene of interest in the appropriate assay or screen. The sequence verified non-targeting clone was digested with the appropriate golden gate enzyme and cleaned using DNA Clean and Concentrator kit (Zymo). The oligos for the spacer of interest were annealed. The annealed spacer was ligated into digested and cleaned vector using a standard Golden Gate Cloning protocol. The reaction was transformed and plated on LB agar+antibiotic. The clones were sanger sequenced and correct clones were chosen.

TABLE 32
Primer sequences

| Screening | | |
|---|---|---|
| vector | F primer sequence | R primer sequence |
| pSTX6 | SAH24: | SAH25: |
| | TTCAGGTTGGACCGGTGCCACCATGGCC | TTTTGGACTAGTCACGGCGGGC |
| | CCAAAGAAGAAGCGGAAGGTCAGCCAAG | TTCCAG (SEQ ID NO: |
| | AGATCAAGAGAATCAACAAGATCAGA | 4105) |
| | (SEQ ID NO: 4104) | |
| pSTX16 or | oIC539: | oIC540: |
| pSTX34 | ATGGCCCCAAAGAAGAAGCGGAAGGTCT | TACCTTTCTCTTCTTTTTTGGA |
| | CTAGACAAG (SEQ ID NO: 4106) | CTAGTCACGG (SEQ ID NO: |
| | | 4107) |

### GFP Editing by Plasmid Lipofection of HEK293T Cells

[0402] Either doxycycline inducible GFP (iGFP) reporter HEK293T cells or SOD1-GFP reporter HEK293T cells were seeded at 20-40k cells/well in a 96 well plate in 100 μl of FB medium and cultured in a 37° C. incubator with 5% CO2. The following day, confluence of seeded cells was checked. Cells were ˜75% confluent at time of transfection. Each CasX construct was transfected at 100-500 ng per well using Lipofectamine 3000 following the manufacturer's protocol, into 3 wells per construct as replicates. SaCas9 and SpyCas9 targeting the appropriate gene were used as benchmarking controls. For each Cas protein type, a non-targeting plasmid was used as a negative control. After 24-48 hours of puromycin selection at 0.3-3 μg/ml to select for successfully transfected cells, followed by 1-7 days of recovery in FB medium, GFP fluorescence in transfected cells was analyzed via flow cytometry. In this process, cells were gated for the appropriate forward and side scatter, selected for single cells and then gated for reporter expression (Attune Nxt Flow Cytometer, Thermo Fisher Scientific) to quantify the expression levels of fluorophores. At least 10,000 events were collected for each sample. The data were then used to calculate the percentage of edited cells.

### GFP Editing by Lentivirus Transduction of HEK293T Cells

[0403] Lentivirus products of plasmids encoding CasX proteins, including controls, CasX variants, and/or CasX libraries, were generated in a Lenti-X 293T Cell Line (Takara) following standard molecular biology and tissue culture techniques. Either iGFP HEK293T cells or SOD1-GFP reporter HEK293T cells were transduced using lentivirus based on standard tissue culture techniques. Selection and fluorescence analysis was performed as described above, except the recovery time post-selection was 5-21 days. For Fluorescence-Activated Cell Sorting (FACS), cells were gated as described above on a MA900 instrument (Sony). Genomic DNA was extracted by QuickExtract™ DNA Extraction Solution (Lucigen) or Genomic DNA Clean & Concentrator (Zymo).

### Engineering of CasX Protein 2 to CasX 119

[0404] Prior work had demonstrated that CasX RNP complexes composed of functional wild-type CasX protein from Planctomycetes (hereafter referred to as CasX protein 2 {or STX2, or STX protein 2, SEQ ID NO:2} and CasX sgRNA 1 {or STX sgRNA 1, SEQ ID NO:4}) are capable of inducing dsDNA cleavage and gene editing of mammalian genomes (Liu, J J et al Nature, 566, 218-223 (2019)). However, previous observations of cleavage efficiency were relatively low (˜30% or less), even under optimal laboratory conditions. These poor rates of genome editing are insufficient for the wild-type CasX CRISPR systems to serve as therapeutic genome-editing molecules. In order to efficiently perform genome editing, the CasX protein must effectively perform two central functions: (i) form and stabilize the R-loop, and (ii) position the nuclease domain for cleavage of both DNA strands. Under conditions in which CasX RNP can access genomic DNA, genome editing rates will be partly governed by the ability of the CasX protein to perform these functions (the other controlling component being the guide RNA). The optimization of both functions is dependent on the complex sequence-function relationship between the linear chain of amino acids encoding the CasX protein and the biochemical properties of the fully formed, cleavage competent RNP. As amino acid mutations that enhance each of these functions can be combined to cumulatively result in a highly engineered CasX protein exhibiting greatly enhanced genome editing efficiency sufficient for human therapeutics, an overall engineering approach was devised in which mutations enhancing function (i) were identified, mutations enhancing function (ii) were identified, and then rational stacking of multiple beneficial mutations would be used to construct CasX variants capable of efficient genome editing. Function (i), stabilization of the R-loop, is by itself sufficient to interfere with gene expression in living cells even in the absence of DNA nuclease activity, a phenomenon known as CRISPR interference (CRISPRi). It was determined that a bacterial CRISPRi assay would be well-suited to identifying mutations enhancing this function. Similarly, a bacterial assay testing for double-stranded DNA (dsDNA) cleavage would be capable of identifying mutations enhancing function (ii). A toxic plasmid clearance assay was chosen to serve as a bacterial selection strategy and identify relevant amino acid changes. These sets of mutations were then validated to provide an enhancement to human genome editing activity, and served as the foundation for more extensive and rational combinatorial testing across increasingly stringent assays.

[0405] The identification of mutations enhancing core functions was performed in an engineering cycle of protein library design, molecular biology construction of libraries, and high-throughput assay of the libraries. Potential improved variants of the STX2 protein were either identified by NGS of a high-throughput biological assay, sequenced directly as clones from a population, or designed de novo for specific hypothesis testing. For high-throughput assays of functions (i) or (ii), a comprehensive and unbiased design approach to mutagenesis was desired for initial diversification. Plasmid recombineering was chosen as a sufficiently comprehensive and rapid method for library construction and was performed in a promoterless staging vector pSTX1 in order to minimize library bias throughout the cloning process. A comprehensive oligonucleotide pool encoded all possible single amino acid substitutions, insertions, and deletions in the STX2 sequence was constructed by DME; the first round of library construction and screening is hereafter referred to as DME1 (FIG. 1). While recombineering is known to produce substantially biased mutation libraries (even from initially uniform pools of oligonucleotides), we deemed this tradeoff acceptable in exchange for an accelerated experimental timeline to improved activity levels. Two high-throughput bacterial assays were chosen to identify potential improved variants from the diverse set of mutations in DME1. As discussed above, we reasoned that a CRISPRi bacterial screen would identify mutations enhancing function (i). While CRISPRi uses a catalytically inactive form of the CasX protein, many specific characteristics together influence the total enhancement of this function, such as expression efficiency, folding rate, protein stability, or stability of the R-loop (including binding affinity to the sgRNA or DNA). DME1 libraries were constructed on the dCasX mutant templates and individually screened. Screening was performed as Fluorescence-Activated Cell Sorting (FACS) of GFP repression in a previously validated dual-color CRISPRi scheme.

### Results:

[0406] For each of DME1, DME2 and DME3, the three libraries exhibited a different baseline CRISPRi activity, thereby serving as independent, yet related, screens. For each library, gates of varying stringency were drawn around the population of interest, and sorted cell populations were deep sequenced to identify CasX mutations enhancing GFP repression (FIG. 33). A second high-throughput bacterial assay was developed to assess dsDNA cleavage in E. coli by way of selection (see methods). When this assay is performed under selective conditions, a functional STX2 RNP can exhibit ˜1000- to 10,000-fold increase in colony forming units compared to nonfunctional CasX protein (FIG. 34). Multiple rounds of liquid media selections were performed for the cleavage-competent libraries of DME1. Sequential rounds of colony picking and sequencing identified mutations to enhance function (ii). Several mutations were observed with increasing frequency with prolonged selection. One mutation of note, the deletion of proline 793, was first observed in round four at a frequency of two out of 36 sequenced colonies. After round five, the frequency increased to six out of 36 sequenced colonies. In round seven, it was observed in ten out of 48 sequenced colonies. This round-over-round enrichment suggested mutations observed in these assays could potentially enhance function (ii) of the CasX protein. Selected mutations observed across these assays can be found in Table 33 as follows:

TABLE 33
Selected mutations observed in bacterial
assays for function (i) or (ii)

| Pos. | Ref. | Alternative* | Assay |
|---|---|---|---|
| 2 | Q | R | 45 C ccdb colony |
| 72 | T | S | D2 CRISPRi |
| 80 | A | T | 37 C ccdb colony |
| 111 | R | K | 45 C ccdb colony |
| 119 | G | C | 45 C ccdb colony |
| 121 | E | D | 37 C ccdb colony |
| 153 | T | I | 37 C ccdb colony |
| 166 | R | S | D2 CRISPRi |
| 203 | R | K | 45 C ccdb colony |
| 270 | S | W | 37 C ccdb colony |
| 346 | D | Y | 45 C ccdb colony |
| 361 | D | A | D1 CRISPRi |
| 385 | E | A | D3 CRISPRi |
| 386 | E | R | 45 C ccdb colony |
| 390 | K | R | D3 CRISPRi |
| 399 | F | L | 45 C ccdb colony |
| 421 | A | G | D2 CRISPRi |
| 433 | S | N | 45 C ccdb colony |
| 489 | D | S | D3 CRISPRi |
| 536 | F | S | D3 CRISPRi |
| 546 | I | V | D2 CRISPRi |
| 552 | E | A | D3 CRISPRi |
| 591 | R | I | 37 C ccdb colony |
| 595 | E | G | D3 CRISPRi |
| 636 | A | D | D3 CRISPRi |
| 657 | — | G | DI CRISPRi |
| 661 | — | L | DI CRISPRi |
| 661 | — | A | D1 CRISPRi |
| 663 | N | S | DI CRISPRi |
| 679 | S | N | D2 CRISPRi |
| 695 | G | H | 45 C ccdb colony |
| 696 | — | P | 45 C ccdb colony |
| 707 | A | D | D3 CRISPRi |
| 708 | A | K | 45 C ccdb colony |
| 712 | D | Q | 37 C ccdb colony |
| 732 | D | P | D1 CRISPRi |
| 751 | A | S | D3 CRISPRi |
| 774 | — | G | DI CRISPRi |
| 788 | A | W | D2 CRISPRi |
| 789 | Y | T | DI CRISPRi |
| 789 | Y | D | D2 CRISPRi |
| 791 | G | M | 45 C ccdb colony |
| 792 | L | E | 45 C ccdb colony |
| 793 | P | — | 45 C ccdb colony |
| 793 | — | AS | 45 C ccdb colony |
| 793 | P | T | 45 C ccdb colony |
| 793 | P | — | DI CRISPRi |
| 793 | — | F | D2 CRISPRi |
| 794 | — | PG | 45 C ccdb colony |
| 794 | — | PS | 45 C ccdb colony |
| 795 | — | AS | 37 C ccdb colony |
| 795 | — | AS | 45 C ccdb colony |
| 796 | — | AG | 37 C ccdb colony |
| 797 | — | AS | 45 C ccdb colony |
| 797 | Y | L | 45 C ccdb colony |
| 799 | S | A | D3 CRISPRi |
| 867 | S | G | 45 C ccdb colony |
| 889 | — | L | 37 C ccdb colony |
| 897 | L | M | 45 C ccdb colony |
| 922 | D | K | Dl CRISPRi |
| 963 | Q | P | D2 CRISPRi |
| 975 | K | Q | D2 CRISPRi |

*substitution, insertion, or deletion; Pos.: Position

[0407] The mutations observed in the bacterial assays above were selected for their potential to enhance CasX protein functions (i) or (ii), but desirable mutations will enhance at least one function while simultaneously remaining compatible with the other. To test this, mutations were tested for their ability to improve human cell genome editing activity overall, which requires both functions acting in concert. A HEK293T GFP editing assay was implemented in which human cells containing a stably-integrated inducible GFP (iGFP) gene were transduced with a plasmid that expresses the CasX protein and sgRNA 2 with spacers to target the RNP to the GFP gene. Mutations identified in bacterial screens, bacterial selections, as well as mutations chosen de novo from biochemical hypotheses resulting from inspection of the published Cryo-EM structure of the homologous DpbCasX protein, were tested for their relative improvement to human genome editing activity as quantified relative to the parent protein STX 2 (FIG. 35), with the greatest improvement demonstrated for construct 119, shown at the bottom of FIG. 35. Several dozen of the proposed function-enhancing mutations were found to improve human cell genome editing substantially, and selected mutations from these assays can be found in Table 34 as follows:

TABLE 34
Selected single mutations observed to enhance genome editing

| | | | Fold-Improvement |
|---|---|---|---|
| | | | (average of |
| Position | Reference | Alternative* | two GFP spacers) |
| 379 | L | R | 1.4 |
| 708 | A | K | 2.13 |
| 620 | T | P | 1.84 |
| 385 | E | P | 1.19 |
| 857 | Y | R | 1.95 |
| 658 | I | V | 1.94 |
| 399 | F | L | 1.64 |
| 404 | L | K | 2.23 |
| 793 | P | — | 1.23 |
| 252 | Q | K | 1.12** |

*substitution, insertion, or deletion
**calculated as the average improvement across four variants with and without the mutation

[0408] The overall engineering approach taken here relies on the central hypothesis that individual mutations enhancing each function can be additively combined to obtain greatly enhanced CasX variants with improved editing capability. FIGS. 20A-20B are a pair of plots that demonstrate that specific subsets of changes discovered by DME of the CasX are more likely to predict improvements of activity. To test this, the single mutations were first identified if they enhanced overall editing activity. Of particular note here, a substitution of the hydrophobic leucine 379 in the helical II domain to a positively charged arginine resulted in a 1.40 fold-improvement in editing activity. This mutation might provide favorable ionic interactions with the nearby phosphate backbone of the DNA target strand (between PAM-distal bp 22 and 23), thus stabilizing R-loop formation and thereby enhancing function (i). A second hydrophobic to charged mutation, alanine 708 to lysine, increased editing activity by 2.13-fold, and might provide additional ionic interactions between the RuvC domain and the sgRNA 5′ end, thus plausibly enhancing function (i) by increasing the binding affinity of the protein for the sgRNA and thereby increasing the rate of R-loop formation. The deletion of proline 793 improved editing activity by 1.23-fold by shortening a loop between an alpha helix and a beta sheet in the RuvC domain, potentially enhancing function (ii) by favorably altering nuclease positioning for dsDNA cleavage. Overall, several dozen single mutations were found to improve editing activity, including mutations identified from each of the bacterial assays as well as mutations proposed from de novo hypothesis generation. To further identify those mutations that enhanced function in a cooperative manner, rational CasX variants composed of combinations of multiple mutations were tested (FIG. 35). An initial small combinatorial set was designed and assayed, of which CasX variant 119 emerged as the overall most improved editing molecule, with a 2.8-fold improved editing efficiency compared to the STX2 wild-type protein. Variant 119 is composed of the three single mutations L379R, A708K, and [P793], demonstrating that their individual contributions to enhancement of function are additive.

### SOD1-GFP Assay Development.

[0409] To assess CasX variants with greatly improved genome-editing activity, we sought to develop a more stringent genome editing assay. The iGFP assay provides a relatively facile editing target such that STX protein 2 in the assays above exhibited an average editing efficiency of 41% and 16% with GFP targeting spacers 4.76 and 4.77 respectively. As protein variants approach 2-fold or greater efficiency improvements, the assay becomes saturated. Therefore a new HEK293T cell line was developed with the GFP sequence integrated in-frame at the C-terminus of the endogenous human gene SOD1, termed the SOD1-GFP line. This cell line served as a new, more stringent, assay to measure the editing efficiency of several hundred additional CasX variant proteins (FIG. 36). Additional mutations were identified from bacterial assays, including a second iteration of DME library construction and screening, as well as utilizing hypothesis-driven approaches. Further exploration of combinatorial improved variants was also performed in the SOD1-GFP assay.

[0410] In light of the SOD1-GFP assay results, measured efficiency improvements were no longer saturated, and CasX variant 119 (indicated by the star in FIG. 36) exhibited a 23.9-fold improvement relative to the wild-type CasX (average of two spacers), with several constructs exhibiting enhanced activity relative to the CasX 119 construct. Alternatively, the dynamic range of the iGFP assay could be increased (though perhaps not completely unsaturated) by reducing the baseline activity of the WT CasX protein, namely by using sgRNA variant 1 rather than 2. Under these more stringent conditions of the iGFP assay, CasX variant 119 exhibited a 15.3-fold improvement relative to the wild-type CasX using the same spacers. Intriguingly, CasX variant 119 also exhibited substantial editing activity with spacers utilizing each of the four NTCN PAM sequences, while WT CasX only edited above 1% with spacers utilizing TTCN and ATCN PAM sequences (FIG. 37), demonstrating the ability of the CasX variant to effectively edit using an expanded spectrum of PAM sequences.

### CasX Function Enhancement by Extensive Combinatorial Mutagenesis.

[0411] Potential improved variants tested in the variety of assays above provided a dataset from which to select candidate lead proteins. Over 300 proteins were assessed in individual clonal assays and of these, 197 single mutations were assessed; the remaining ˜100 proteins contained combinatorial combinations of these mutations. Protein variants were assessed via three different assays (plasmid p6 by iGFP, plasmid p6 by SOD1-GFP, or plasmid p16 by SOD1-GFP). While single mutants led to significant improvements in the iGFP assay (with fraction GFP—greater than 50%), these single-mutants all performed poorly in the SOD1-GFP p6 backbone assay (fraction GFP—less than 10%). However, proteins containing multiple, stacked mutations were able to successfully inactivate GFP in this more stringent assay, indicating that stacking of improved mutations could substantially improve cleavage activity.

[0412] Individual mutations observed to enhance function often varied in their capacity to additively improve editing activity when combined with additional mutations. To rationally quantify these epistatic effects and further improve genome editing activity, a subset of mutations was identified that had each been added to a protein variant containing at least one other mutation, and where both proteins (with and without the mutation) were tested in the same experimental context (assay and spacer; 46 mutations total). To determine the effect due to that mutation, the fraction GFP—was compared with and without the mutation. For each protein/experimental context, the mutation effect was quantified as: 1) substantially improving the activity (fv>1.1 f0 where f0 is the fraction GFP—without the mutation, and fv is the fraction GFP—with the mutation), 2) substantially worsening the activity (fv<0.9f0), or 3) not affecting activity (neither of the other conditions are met). An overall score per mutation was calculated (s), based on the fraction of protein/experiment contexts in which the mutation substantially improved activity, minus the fraction of contexts in which the mutation substantially worsened activity. Out of the 46 mutations obtained, only 13 were associated with consistently increased activity (s≥0.5), and 18 mutations substantially decreased activity (s≤−0.5). Importantly, the distinction between these mutations was only clear when examining epistatic interactions across a variety of variant contexts: all of these mutations had comparable activity in the iGFP assay when measured alone.

[0413] The above quantitative analysis allowed the systematic design of an additional set of highly engineered CasX proteins composed of single mutations enhancing function both individually and in combination. First, seven out of the top 13 mutations were chosen to be stacked (the other 6 variants comprised the three variants A708K, [P793] and L379R that were included in all proteins, and another two that affected redundant positions; see FIGS. 14A-14F). These mutations were iteratively stacked onto three different versions of the CasX protein: CasX 119, 311, and 365; proceeding to add only one mutation (for example, Y857R), to adding several mutations in combination. In order to maximize the combination of enhancements for both function (i) and function (ii), individual mutations were rationally chosen to maintain a diversity of biochemical properties—i.e., multiple mutations that substitute a hydrophobic residue with a negatively charged residue were avoided. The resulting ˜30 protein variants had between five and 10 individual mutations relative to STX2 (mode=7 mutations). The proteins were tested in a lipofection assay in a new backbone context (p34) with guide scaffold 64, and most showed improvement relative to protein 119. The most improved variant of this set, protein 438, was measured to be >20% improved relative to protein 119 (see Table 35 below).

Lentiviral Transduction iGFP Assay Development

[0414] As discussed above regarding the iGFP assay, enhancements to the CasX system had likely resulted in the lipofection assay becoming saturated—that is, limited by the dynamic range of the measurement. To increase the dynamic range, a new assay was designed in which many fewer copies of the CasX gene are delivered to human cells, consisting of lentiviral transductions in a new backbone context, plasmid pSTX34. Under this more stringent delivery modality, the dynamic range was sufficient to observe the improvements of CasX variant protein 119 in the context of a further improved sgRNA, namely sgRNA variant 174. Improved variants of both the protein and sgRNA were found to additively combine to produce yet further improved CasX CRISPR systems. Protein variant 119 and sgRNA variant 174 were each measured to improve iGFP editing activity by approximately an order of magnitude when compared with wild-type CasX protein 2 (SEQ ID NO:2) in complex with sgRNA 1 (SEQ ID NO:4) under the lipofection iGFP assay (FIG. 38). Moreover, improvements to editing activity from the protein and sgRNA appear to stack nearly linearly; while individually substituting CasX 2 for CasX 119, or substituting sgRNA 174 for sgRNA 1, produces a ten-fold improvement, substituting both simultaneously produces at least another ten-fold improvement (FIG. 39). Notably, this range of activity improvements exceeds the dynamic range of either assay. However, the overall activity improvement can be estimated by calculating the fold change relative to the sample 2.174, which was measured precisely in both assays. The enhancement of the highly engineered CasX CRISPR system 119.174 over wild type CasX CRISPR system 2.1 resulted in a 259-fold improvement in genome editing efficiency in human cells (+/−58, propagated standard deviation), supporting that, under the conditions of the assay, the engineering of both the CasX and the guide led to dramatic improvements in editing efficiency compared to wild-type CasX and guide.

### Engineering of Domain Exchange Variants

[0415] One problematic limitation of mutagenesis-based directed evolution is the combinatorial increase of possible sequences as one takes larger steps in sequence-space. To overcome this, swapping of protein domains from homologous sequences was evaluated as an alternative approach. To take advantage of the phylogenetic data available for the CasX CRISPR system, alignments were made between the CasX 1 (SEQ ID NO:1) and CasX 2 (SEQ ID NO:2) protein sequences, and domains were annotated for exchange in the context of improved CasX variant protein 119. To benchmark CasX 119 against the top designed combinatorial CasX variant proteins and the top domain exchanged variants, all within the context of improved sgRNA 174, a stringent iGFP lentiviral transduction assay was performed. Protein variants from each class were identified as improved relative to CasX variant 119 (FIG. 40), and fold changes are represented in Table 35. For example, at day 13, CasX 119.174 with GFP spacer 4.76 leads to phenotype disruption in only ˜60% of cells, while CasX variant 491 in the same context results in >90% phenotypic editing. To summarize, the compared proteins contained the following number of mutations relative to the WT CasX protein 2: 119=3 point mutations; 438 =7 point mutations; 488=protein 119, with NTSB and helical Ib domains from CasX 1 (67 mutations total); 491=5 point mutations, with NTSB and helical Ib domains from CasX 1 (69 mutations total).

TABLE 35
CasX variant improvements over CasX variant 119 in the iGFP
lentiviral transduction assay, in the context of improved sgRNA 174.

| | Fold-change | Fold-change |
|---|---|---|
| Cas X | editing activity, | editing activity, |
| Protein | spacer 4.76* | spacer 4.77* |
| 119 | 1.00 | 1.00 |
| 438 | 1.22 | 1.21 |
| 488 | 1.41 | 2.43 |
| 491 | 1.55 | 3.03 |

*relative to CasX 119

[0416] The results demonstrate that the application of rationally-designed libraries, screening, and analysis methods into a technique we have termed Deep Mutational Evolution to scan fitness landscapes of both the CasX protein and guide RNA enabled the identification and validation of mutations which enhanced specific functions, contributing to the improvement of overall genome editing activity. These datasets enabled the rational combinatorial design of further improved CasX and guide variants disclosed herein.

### Example 17: Design and Evaluation of Improved Guide RNA Variants

[0417] The existing CasX platform based on wild-type sequences for dsDNA editing in human cells achieves very low efficiency editing outcomes when compared with alternative CRISPR systems (Liu, J J et al Nature, 566, 218-223 (2019)). Cleavage efficiency of genomic DNA is governed, in large part, by the biochemical characteristics of the CasX system, which in turn arise from the sequence-function relationship of each of the two components of a cleavage-competent CasX RNP: a CasX protein complexed with a sgRNA. The purpose of the following experiments was to create and identify gRNA scaffold variants with enhanced editing properties relative to wild-type CasX:gNA RNP through a program of comprehensive mutagenesis and rational approaches.

### Methods

[0418] Methods for High-Throughput sgRNA Library Screens
1) Molecular Biology of sgRNA Library Construction

[0419] To build a library of sgRNA variants, primers were designed to systematically mutate each position encoding the reference gRNA scaffold of SEQ ID NO: 5, where mutations could be substitutions, insertions, or deletions. In the following in vivo bacterial screens for sgRNA mutations, the sgRNA (or mutants thereof) was expressed from a minimal constitutive promoter on the plasmid pSTX4. This minimal plasmid contains a ColE1 replication origin and carbenicillin antibiotic resistance cassette, and is 2311 base pairs in length, allowing standard Around-the-Horn PCR and blunt ligation cloning (using conventional methodologies). Forward primers KST223-331 and reverse primers KST332-440 tile across the sgRNA sequence in one base-pair increments and were used to amplify the vector in two sequential PCR steps. In step 1, 108 parallel PCR reactions are performed for each type of mutation, resulting in single base mutations at each designed position. Three types of mutations were generated. To generate base substitution mutations, forward and reverse primers were chosen in matching pairs beginning with KST224+KST332. To generate base insertion mutations, forward and reverse primers were chosen in matching pairs beginning with KST223+KST332. To generate base deletion mutations, forward and reverse primers were chosen in matching pairs beginning with KST225+KST332. After Step 1 PCR, samples were pooled into an equimolar manner, blunt-ligated, and transformed into Turbo E. coli (New England Biolabs), followed by plasmid extraction the next day. The resulting plasmid library theoretically contained all possible single mutations. In Step 2, this process of PCR and cloning was then repeated using the Step 1 plasmid library as the template for the second set of PCRs, arranged as above, to generate all double mutations. The single mutation library from Step 1 and the double mutation library from Step 2 were pooled together.

[0420] After the above cloning steps, the library diversity was assessed with next generation sequencing (see below section for methods) (see FIG. 41). It was confirmed that the majority of the library contained more than one mutation (‘other’) category. A substantial fraction of the library contained single base substitutions, deletions, and insertions (average representation within the library of 1/18,000 variants for single substitutions, and up to 1/740 variants for single deletions).

2) Assessing Library Diversity with Next Generation Sequencing.

[0421] For NGS analysis, genomic DNA was amplified via PCR with primers specific to the scaffold region of the bacterial expression vector to form a target amplicon. These primers contain additional sequence at the 5′ ends to introduce Illumina read (see Table 36 for sequences). Typical PCR conditions were: 1× Kapa Hifi buffer, 300 nM dNTPs, 300 nM each primer, 0.75 ul of Kapa Hifi Hotstart DNA polymerase in a 50 μl reaction. On a thermal cycler, incubate for 95° C. for 5 min; then 16-25 cycles of 98° C. for 15 s, 60° C. for 20 s, 72° C. for 1 min; with a final extension of 2 min at 72° C. Amplified DNA product was purified with Ampure XP DNA cleanup kit, with elution in 30 μl of water. A second PCR step was done with indexing adapters to allow multiplexing on the Illumina platform. 20 μl of the purified product from the previous step was combined with 1× Kapa GC buffer, 300 nM dNTPs, 200 nM each primer, 0.75 of Kapa Hifi Hotstart DNA polymerase in a 50 μl reaction. On a thermal cycler, cycle for 95° C. for 5 min; then 18 cycles of 98° C. for 15 s, 65° C. for 15 s, 72° C. for 30 s: with a final extension of 2 min at 72° C. Amplified DNA product was purified with Ampure XP DNA cleanup kit, with elution in 30 μl of water. Quality and quantification of the amplicon was assessed using a Fragment Analyzer DNA analyzer kit (Agilent, dsDNA 35-1500 bp).

TABLE 36
primer sequences.

| Primer | SEQ ID NO |
|---|---|
| PCR1 Fwd | 4108 |
| PCR2 Rvs | 4109 |
| PCR2 Fwd | 4110 |
| PCR2_Rvs_v1_001 | 4111 |
| PCR2_Rvs_v1_002 | 4112 |
| PCR2_Rvs_v1_003 | 4113 |
| PCR2_Rvs_v1_004 | 4114 |
| PCR2_Rvs_v1_005 | 4115 |
| PCR2_Rvs_v1_006 | 4116 |
| PCR2_Rvs_v1_007 | 4117 |
| PCR2_Rvs_v1_008 | 4118 |
| PCR2_Rvs_v1_009 | 4119 |
| PCR2_Rvs_v1_010 | 4120 |
| PCR2_Rvs_v1_011 | 4121 |
| PCR2_Rvs_v1_012 | 4122 |
| PCR2_Rvs_v1_013 | 4123 |
| PCR2_Rvs_v1_014 | 4124 |
| PCR2_Rvs_v1_015 | 4125 |
| PCR2_Rvs_v1_016 | 4126 |
| PCR2_Rvs_v1_017 | 4127 |
| PCR2_Rvs_v1_018 | 4128 |
| PCR2_Rvs_v1_019 | 4129 |
| PCR2_Rvs_v1_020 | 4130 |
| PCR2_Rvs_v1_021 | 4131 |
| PCR2_Rvs_v1_022 | 4132 |
| PCR2_Rvs_v1_023 | 4133 |
| PCR2_Rvs_v1_024 | 4134 |
| PCR2_Rvs_v1_025 | 4135 |
| PCR2_Rvs_v1_026 | 4136 |
| PCR2_Rvs_v1_027 | 4137 |
| PCR2_Rvs_v1_028 | 4138 |
| PCR2_Rvs_v1_029 | 4139 |
| PCR2_Rvs_v1_030 | 4140 |
| PCR2_Rvs_v1_031 | 4141 |
| PCR2_Rvs_v1_032 | 4142 |
| PCR2_Rvs_v1_033 | 4143 |
| PCR2_Rvs_v1_034 | 4144 |
| PCR2_Rvs_v1_035 | 4145 |
| PCR2_Rvs_v1_036 | 4146 |
| PCR2_Rvs_v1_037 | 4147 |
| PCR2_Rvs_v1_038 | 4148 |
| PCR2_Rvs_v1_039 | 4149 |
| PCR2_Rvs_v1_040 | 4150 |
| PCR2_Rvs_v1_041 | 4151 |
| PCR2_Rvs_v1_042 | 4152 |
| PCR2_Rvs_v1_043 | 4153 |
| PCR2_Rvs_v1_044 | 4154 |
| PCR2_Rvs_v1_045 | 4155 |
| PCR2_Rvs_v1_046 | 4156 |
| PCR2_Rvs_v1_047 | 4157 |
| PCR2_Rvs_v1_048 | 4158 |
| PCR2_Rvs_v2_001 | 4159 |
| PCR2_Rvs_v2_002 | 4160 |
| PCR2_Rvs_v2_003 | 4161 |
| PCR2_Rvs_v2_004 | 4162 |
| PCR2_Rvs_v2_005 | 4163 |
| PCR2_Rvs_v2_006 | 4164 |
| PCR2_Rvs_v2_007 | 4165 |
| PCR2_Rvs_v2_008 | 4166 |
| PCR2_Rvs_v2_009 | 4167 |
| PCR2_Rvs_v2_010 | 4168 |
| PCR2_Rvs_v2_011 | 4169 |
| PCR2_Rvs_v2_012 | 4170 |
| PCR2_Rvs_v2_013 | 4171 |
| PCR2_Rvs_v2_014 | 4172 |
| PCR2_Rvs_v2_015 | 4173 |
| PCR2_Rvs_v2_016 | 4174 |
| PCR2_Rvs_v2_017 | 4175 |
| PCR2_Rvs_v2_018 | 4176 |
| PCR2_Rvs_v2_019 | 4177 |
| PCR2_Rvs_v2_020 | 4178 |
| PCR2_Rvs_v2_021 | 4179 |
| PCR2_Rvs_v2_022 | 4180 |
| PCR2_Rvs_v2_023 | 4181 |
| PCR2_Rvs_v2_024 | 4182 |
| PCR2_Rvs_v2_025 | 4183 |
| PCR2_Rvs_v2_026 | 4184 |
| PCR2_Rvs_v2_027 | 4185 |

### 3) Bacterial CRISPRi (CRISPR Interference) Assay

[0422] A dual-color fluorescence reporter screen was implemented, using monomeric Red Fluorescent Protein (mRFP) and Superfolder Green Fluorescent Protein (sfGFP), based on Qi L S, et al. (Cell 152, 5, 1173-1183 (2013)). This screen was utilized to assay gene-specific transcriptional repression mediated by programmable DNA binding of the CasX system). This strain of E. coli expresses bright green and red fluorescence under standard culturing conditions or when grown as colonies on agar plates. Under a CRISPRi system, the CasX protein is expressed from an anhydrotetracycline (aTc)-inducible promoter on a plasmid containing a p15A replication origin (plasmid pSTX3; chloramphenicol resistant), and the sgRNA is expressed from a minimal constitutive promoter on a plasmid containing a ColE1 replication origin (pSTX4, non-targeting spacer, or pSTX5, GFP-targeting spacer #1; carbenicillin resistant). When the E. coli strain is co-transformed with both plasmids, genes targeted by the spacer in pSTX4 are repressed; in this case GFP repression is observed, the degree to which is dependent on the function of the targeting CasX protein and sgRNA. In this system, RFP fluorescence can serve as a normalizing control. Specifically, RFP fluorescence should be unaltered and independent of functional CasX based CRISPRi activity. CRISPRi activity can be tuned in this system by regulating the expression of the CasX protein; here, all assays used an induction concentration of 20 nM aTc final concentration in growth media.

[0423] Libraries of sgRNA were constructed to assess the activity of sgRNA variants in complex with three cleavage-inactivating mutations made to the reference CasX protein open reading frame of Planctomycetes, SEQ ID NO: 2, rendering the CasX catalytically dead (dCasX). These three mutations are referred to as D1 (with a D659A substitution), D2 (with a E756A substitution), or D3 (with a D922A substitution). A fourth library, composed of all three mutations in combination is referred to as DDD (D659A; E756A; D922A substitutions).

[0424] Libraries of sgRNA were screened for activity using the above CRISPRi system with either D2, D3, or DDD. After co-transformation and recovery, libraries were grown for 8 hours in 2xyt media with appropriate antibiotics and sorted on a Sony MA900 flow cytometry instrument. Each library version was sorted with three different gates (in addition to the naive, unsorted library). Three different sort gates were employed to extract GFP—cells: 10%, 1%, and “F” which represents ˜0.1% of cells, ranked by GFP repression. Finally, each sort was done in two technical replicates. Variants of interest were detected using either Sanger sequencing of picked colonies (UC Berkeley Barker Sequencing Facility) or NGS sequencing of miniprepped plasmid (Massachusetts General Hospital CCIB DNA Core Next-Generation Sequencing Service) or NGS sequencing of PCR amplicons, produced with primers that introduced indexing adapters for sequencing on an Illumina platform (see section above). Amplicons were sent for sequencing with Novogene (Beijing, China) for sequencing on an Illumina Hiseq, with 150 cycle, paired-end reads. Each sorted sample had at least 3 million reads per technical replicate, and at least 25 million reads for the naive samples. The average read count across all samples was 10 million reads.

### 4) NGS Data Analysis

[0425] Paired end reads were trimmed for adapter sequences with cutadapt (version 2.1), merged to form a single read with flash2 (v2.2.00), and aligned to the reference with bowtie2 (v2.3.4.3). The reference was the entire amplicon sequence, which includes ˜30 base pairs flanking the Planctomyces reference guide scaffold from the plasmid backbone having the sequence:

(SEQ ID NO: 4221)
TGACAGCTAGCTCAGTCCTAGGTATAATACTAGTTACTGGCGCTTTTAT
CTCATTACTTTGAGAGCCATCACCAGCGACTATGTCGTATGGGTAAAGC
GCTTATTTATCGGAGAGAAATCCGATAAATAAGAAGCATCAAAGCTGGA
GTTGTCCCAATTCTTCTAGAG.

[0426] Variants between the reference and the read were determined from the bowtie2 output. In brief, custom software in python (analyzeDME/bin/bam_to_variants.py) extracted single-base variants from the reference sequence using the cigar string and and string from each alignment. Reads with poor alignment or high error rates were discarded (mapq <20 and estimated error rate >4%; estimated error rate was calculated using per-base phred quality scores). Single-base variants at locations of poor-quality sequencing were discarded (phred score <20). Immediately adjacent single-base variants were merged into one mutation that could span multiple bases. Mutations were labeled for being single substitutions, insertions, or deletions, or other higher-order mutations, or outside the scaffold sequence.

[0427] The number of reads that supported each set of mutations was determined. These read counts were normalized for sequencing depth (mean normalization), and read counts from technical replicates were averaged by taking the geometric mean.

[0428] To obtain enrichment values for each scaffold variant, the number of normalized reads for each sorted sample were compared to the average of the normalized read counts for D2 and D3, which were highly correlated (FIG. 41). The naive DDD sample was not sequenced. To obtain the enrichment for each catalytically dead CasX variant, the log of the enrichment values across the three sort gates were averaged.

Methods for Individual Validation of sgRNA Activity in Human Cell Assays
1) Individual sgRNA Variant Construction

[0429] In order to screen variants of interest, individual variants were constructed using standard molecular biology techniques. All mutations were built on the reference CasX (SEQ ID NO:2) using a staging vector and Gibson cloning. To build single mutations, a universal forward (5′→3′) and reverse (3′→5′) primer were designed on either end of the encoded protein sequence that had homology to the desired backbone for screening (see Table 37 below). Primers to create the desired mutations were also designed (F primer and its reverse complement) and used with the universal F and R primers for amplification; thus producing two fragments. In order to add multiple mutations, additional primers with overlap were designed and more PCR fragments were produced. For example, to construct a triple mutant, four sets of F/R primers were designed. The resulting PCR fragments were gel extracted. These fragments were subsequently assembled into a screening vector (see Table 37), by digesting the screening vector backbone with the appropriate restriction enzymes and gel extraction. The insert fragments and vector were then assembled using Gibson assembly master mix, transformed, and plated using appropriate LB agar+antibiotic. The clones were Sanger sequenced and correct clones were chosen.

[0430] Finally, spacer cloning was performed to target the guide RNA to a gene of interest in the appropriate assay or screen. The sequence-verified non-targeting clone was digested with the appropriate Golden Gate enzyme and cleaned using DNA Clean and Concentrator kit (Zymo). The oligos for the spacer of interest were annealed. The annealed spacer was ligated into a digested and cleaned vector using a standard Golden Gate Cloning protocol. The reaction was transformed into Turbo E. coli and plated on LB agar+carbenicillin, and allowed to grow overnight at 37° C. Individual colonies were picked the next day, grown for eight hours in 2XYT +carbenicillin at 37° C., and miniprepped. The clones were Sanger sequenced and correct clones were chosen.

TABLE 37
screening vectors and associated primer sequences

| Screening | | |
|---|---|---|
| vector | F primer sequence | R primer sequence |
| pSTX6 | SAH24: | SAH25: |
| | TTCAGGTTGGACCGGTGCCACCATGGCC | TTTTGGACTAGTCACGGCGGGC |
| | CCAAAGAAGAAGCGGAAGGTCAGCCAAG | TTCCAG (SEQ ID NO: |
| | AGATCAAGAGAATCAACAAGATCAGA | 4105) |
| | (SEQ ID NO: 4104) | |
| pSTX16 or | oIC539: | oIC540: |
| pSTX34 | ATGGCCCCAAAGAAGAAGCGGAAGGTCT | TACCTTTCTCTTCTTTTTTGGA |
| | CTAGACAAG (SEQ ID NO: 4106) | CTAGTCACGG (SEQ ID NO: |
| | | 4107) |

### 2) GFP Editing by Plasmid Lipofection of HEK293T Cells

[0431] Either doxycycline-inducible GFP (iGFP) reporter HEK293T cells or SOD1-GFP reporter HEK293T cells were seeded at 20-40 k cells/well in a 96 well plate in 100 μl of FB medium and cultured in a 37° C. incubator with 5% CO2. The following day, confluence of seeded cells was checked. Cells were ˜75% confluent at time of transfection. Each CasX construct was transfected at 100-500 ng per well using Lipofectamine 3000 following the manufacturer's protocol, into 3 wells per construct as replicates. SaCas9 and SpyCas9 targeting the appropriate gene were used as benchmarking controls. For each Cas protein type, a non-targeting plasmid was used as a negative control.

[0432] After 24-48 hours of puromycin selection at 0.3-3 μg/ml to select for successfully transfected cells, followed by 1-7 days of recovery in FB medium, GFP fluorescence in transfected cells was analyzed via flow cytometry. In this process, cells were gated for the appropriate forward and side scatter, selected for single cells and then gated for reporter expression (Attune Nxt Flow Cytometer, Thermo Fisher Scientific) to quantify the expression levels of fluorophores. At least 10,000 events were collected for each sample. The data were then used to calculate the percentage of edited cells.

### 3) GFP Editing by Lentivirus Transduction of HEK293T Cells

[0433] Lentivirus products of plasmids encoding CasX proteins, including controls, CasX variants, and/or CasX libraries, were generated in a Lenti-X 293T Cell Line (Takara) following standard molecular biology and tissue culture techniques. Either iGFP HEK293T cells or SOD1-GFP reporter HEK293T cells were transduced using lentivirus based on standard tissue culture techniques. Selection and fluorescence analysis was performed as described above, except the recovery time post-selection was 5-21 days. For Fluorescence-Activated Cell Sorting (FACS), cells were gated as described above on a MA900 instrument (Sony). Genomic DNA was extracted by QuickExtract™ DNA Extraction Solution (Lucigen) or Genomic DNA Clean & Concentrator (Zymo).

### Results:

[0434] Engineering of sgRNA 1 to 174
1) sgRNA Derived from Metagenomics of Bacterial Species Improved Function in Human Cells

[0435] An initial improvement in CasX RNP cleavage activity was found by assessing new metagenomic bacterial sequences for possible CasX guide scaffolds. Prior work demonstrated that Deltaproteobacteria sgRNA (SEQ ID NO:4) could form a functional RNA-guided nuclease complex with CasX proteins, including the Deltaproteobacteria CasX (SEQ ID NO:1 or Planctomycetes CasX (SEQ ID NO:2). Structural characterization of this complex allowed identification of structural elements within the sgRNA (FIG. 42). However, a sgRNA scaffold from Planctomycetes was never tested. A second tracrRNA was identified from Planctomycetes, which was made into an sgRNA with the same method as was used for Deltaproteobacteria tracrRNA-crRNA (SEQ ID NO:5) (Liu, J J et al Nature, 566, 218-223 (2019)). These two sgRNA had similar structural elements, based on RNA secondary structure prediction algorithms, including three stem loop structures and possible triplex formation (FIG. 43).

[0436] Characterization the activity of Planctomycetes CasX protein complexed with the Deltaproteobacteria sgRNA (hereafter called RNP 2.1, wherein the CasX protein has the sequence of SEQ ID NO:2) and Planctomycetes CasX protein complexed with scaffold 2 sgRNA (hereafter called RNP 2.2) showed clear superiority of RNP 2.2 compared to the others in a GFP-lipofection assay (see Methods) (FIG. 44). Thus, this scaffold formed the basis of our molecular engineering and optimization.

### 2) Improving Activity of CasX RNP Through Comprehensive RNA Scaffold Mutagenesis Screen.

[0437] To find mutations to the guide RNA scaffold that could improve dsDNA cleavage activity of the CasX RNP, a large diversity of insertions, deletions and substitutions to the gRNA scaffold 2 were generated (see Methods). This diverse library was screened using CRISPRi to determine variants that improved DNA-binding capabilities and ultimately improved cleavage activity in human cells. The library was generated through a process of pooled primer cloning as described in the Materials and Methods. The CRISPRi screen was carried out using three enzymatically-inactive versions of CasX (called D2, D3, and DDD; see Methods). Library variants with improved DNA binding characteristics were identified through a high-throughput sorting and sequencing approach. Scaffold variants from cells with high GFP repression (i.e., low fluorescence) were isolated and identified with next generation sequencing. The representation of each variant in the GFP—pool was compared to its representation in the naive library to form an enrichment score per variant (see Materials and Methods). Enrichment was reproducible across the three catalytically dead-CasX variants (FIG. 46).

[0438] Examining the enrichment scores of all single variants revealed mutable locations within the guide scaffold, especially the extended stem (FIG. 45). The top-20 enriched single variants outside of the extended stem are listed in Table 38. In addition to the extended stem, these largely cluster into four regions: position 55 (scaffold stem bubble), positions 15-19 (triplex loop), position 27 (triplex), and in the 5′ end of the sequence (positions 1, 2, 4, 8). While the majority of these top-enriched variants were consistently enriched across all three catalytically dead CasX versions, the enrichment at position 27 was variable, with no evident enrichment in the D3 CasX (data not shown).

[0439] The enrichment of different structural classes of variants suggested that the RNP activity might be improved by distinct mechanisms. For example, specific mutations within the extended stem were enriched relative to the WT scaffold. Given that this region does not substantially contact the CasX protein (FIG. 42A), we hypothesize that mutating this region may improve the folding stability of the gRNA scaffold, while not affecting any specific protein-binding interaction interfaces. On the other hand, 5′ mutations could be associated with increased transcriptional efficiency. In a third mechanism, it was reasoned that mutations to the scaffold stem bubble or triplex could lead to increased stability through direct contacts with the CasX protein, or by affecting allosteric mechanisms with the RNP. These distinct mechanisms to improve RNP binding support that these mutations could be stacked or combined to additively improve activity.

TABLE 38
Top enriched single-variants outside of extended stem.

| | | | | log2 | |
|---|---|---|---|---|---|
| Position | Annotation | Reference | Alternate | enrichment | Region |
| 55 | insertion | — | G | 2.37466 | scaffold stem |
| | | | | | bubble |
| 55 | insertion | — | T | 1.93584 | scaffold stem |
| | | | | | bubble |
| 15 | insertion | — | T | 1.65155 | triplex loop |
| 17 | insertion | — | T | 1.56605 | triplex loop |
| 4 | deletion | T | — | 1.48676 | 5′ end |
| 27 | insertion | — | C | 1.26385 | triplex |
| 16 | insertion | — | C | 1.26025 | triplex loop |
| 19 | insertion | — | T | 1.25306 | triplex loop |
| 18 | insertion | — | G | 1.22628 | triplex loop |
| 2 | deletion | A | — | 1.17690 | 5′ end |
| 17 | insertion | — | A | 1.16081 | triplex loop |
| 18 | substitution | C | T | 1.10247 | triplex loop |
| 18 | insertion | — | A | 1.04716 | triplex loop |
| 16 | substitution | C | T | 0.97399 | triplex loop |
| 8 | substitution | G | C | 0.95127 | pseudoknot |
| 16 | substitution | C | A | 0.89373 | triplex loop |
| 27 | insertion | — | A | 0.86722 | triplex |
| 1 | substitution | T | C | 0.83183 | 5′ end |
| 18 | deletion | C | — | 0.77641 | triplex loop |
| 19 | insertion | — | G | 0.76838 | triplex loop |

3) Assessing RNA Scaffold Mutants in dsDNA Cleavage Assay in Human Cells

[0440] The CRISPRi screen is capable of assessing binding capacity in bacterial cells at high throughput; however it does not guarantee higher cleavage activity in human cell assays. We next assessed a large swath of individual scaffold variants for cleavage capacity in human cells using a plasmid lipofection in HEK cells (see Materials and Methods). In this assay, human HEK293T cells containing a stably-integrated GFP gene are transduced with a plasmid (p16) that expresses reference CasX protein (Stx2) (SEQ ID NO: 2) and sgRNA comprising the gRNA scaffold variant and spacers 4.76 (having sequence UGUGGUCGGGGUAGCGGCUG (SEQ ID NO: 4222) and 4.77 (having sequence UCAAGUCCGCCAUGCCCGAA (SEQ ID NO: 4223)) to target the RNP to knockdown the GFP gene. Percent GFP knockdown was assayed using flow cytometry. Over a hundred scaffold variants were tested in this assay.

[0441] The assay resulted in largely reproducible values across different assay dates for spacer 4.76, while exhibiting more variability for spacer 4.77 (FIG. 51). Spacer 4.77 was generally less active for the wild-type RNP complex, and the lower overall signal may have contributed to this increased variability. Comparing the cleavage activity across the two spacers showed generally correlated results (r=0.652; FIG. 52). Because of the increased noise in spacer 4.77 measurements, the reported cleavage activity per scaffold was taken as the weighted average between the measurements on each scaffold, with the weights equal to the inverse squared error. This weighting effectively down-weights the contribution from high-error measurements.

[0442] A subset of sequences was tested in both the HEK-iGFP assay and the CRISPRi assay. Comparing the CRISPRi enrichment score to the GFP cleavage activity showed that highly-enriched variants had cleavage activity at or exceeding the wildtype RNP (FIG. 45C). Two variants had high cleavage activity with low enrichment scores (C18G and T17G); interestingly, these substitutions are at the same position as several highly-enriched insertions (FIG. 53).

[0443] Examining all scaffolds tested in the HEK-iGFP assay revealed certain features that consistently improved cleavage activity. We found that the extended stem could often be completely swapped out for a different stem, with either improved or equivalent activity (e.g., compare scaffolds of SEQ ID NO: 2101-2105, 2111, 2113, 2115; all of which have replaced the extended stem, with increased activity relative to the reference, as seen in Table 27). We specifically focused on two stems with different origins: a truncated version of the wildtype stem, with the loop sequence replaced by the highly stable UUCG tetraloop (stem 42). The other (stem 46) was derived from Uvsx bacteriophage T4 mRNA, which in its biological context is important for regulation of reverse transcription of the bacteriophage genome (Tuerk et al. Proc Natl Acad Sci USA. 85(5):1364 (1988)). The top-performing gRNA scaffolds all had one of these two extended stem versions (e.g., SEQ ID NOS: 2160 and 2161).

[0444] Appending ribozymes to the 3′ end often resulted in functional scaffolds (e.g., see SEQ ID NO: 2182 with equivalent activity to the WT guide in this assay {Table 27}). On the other hand, adding to the 5′ end generally hurt cleavage activity. The best-performing 5′ ribozyme construct (SEQ ID NO:2208) had cleavage activity <40% of the WT guide in the assay.

[0445] Certain single-point mutations were generally good, or at least not harmful, including T 10C, which was designed to increase transcriptional efficiency in human cells by removing the four consecutive T's at the 5′ start of the scaffold (Kiyama and Oishi. Nucleic Acids Res., 24:4577 (1996)). C18G was another helpful mutation, which was obtained from individual colony picking from the CRISPRi screen. The insertion of C at position 27 was highly-enriched in two out of the three dCasX versions of the CRISPRi screen; however, it did not appear to help cleavage activity. Finally, insertion at position 55 within the RNA bubble substantially improved cleavage activity (i.e., compare SEQ ID NO: 2236, with a \hat{ }G55 insertion to SEQ ID NO:2106 in Table 27).

### 4) Further Stacking of Variants in Higher-Stringency Cleavage Assays

[0446] Scaffold mutations that proved beneficial were stacked together to form a set of new variants that were tested under more stringent criteria: a plasmid lipofection assay in human HEK-293t cells with the GFP gene knocked into the SOD1 allele, which we observed was generally harder to knock down. Of this batch of variants, guide scaffold 158 was identified as a top-performer (FIG. 47). This scaffold had a modified extended stem (Uvsx), with additional mutations to fully base pair the extended stem ([A99] and G65U). It also contained mutations in the triplex loop (C18G) and in the scaffold stem bubble (\hat{ }G55).

[0447] In a second validation of improved DNA editing capacity, sgRNAs were delivered to cells with low-MOI lentiviral transduction, and with distinct targeting sequences to the SOD1 gene (see Methods); spacers were 8.2 (having sequence AUGUUCAUGAGUUUGGAGAU (SEQ ID NO: 4224)), and 8.4 (having sequence UCGCCAUAACUCGCUAGGCC (SEQ ID NO: 4225)) (results shown in FIG. 48). Additionally, 5′ truncations of the initial GT of guide scaffolds 158 and 64 were deleted (forming scaffolds 174 and 175 respectively). This assay showed dominance of guide scaffold 174: the variant derived from guide scaffold 158 with 2 bases truncated from the 5′ end (FIG. 48). A schematic of the secondary structure of scaffold 174 is shown in FIG. 49.

[0448] In sum, our improved guide scaffold 174 showed marked improvement over our starting reference guide scaffold (scaffold 1 from Deltaproteobacteria, SEQ ID NO:4), and substantial improvement over scaffold 2 (SEQ ID NO:5) (FIG. 50). This scaffold contained a swapped extended stem (replacing 32 bases with 14 bases), additional mutations in the extended stem ([A99] and G65U), a mutation in the triplex loop (C18G), and in the scaffold stem bubble (AG55) (where all the numbering refers to the scaffold 2). Finally, the initial T was deleted from scaffold 2, as well as the G that had been added to the 5′ end in order to enhance transcriptional efficiency. The substantial improvements seen with guide scaffold 174 came collectively from the indicated mutations.

### Example 18: Design of Improved Guides Based on Predicted Secondary Structure Stability Methods

[0449] A computational method was employed to predict the relative stability of the ‘target’ secondary structure, compared to alternative, non-functional secondary structures. First, the ‘target’ secondary structure of the gRNA was determined by extracting base-pairs formed within the RNA in the CryoEM structure for CasX 1.1. For prediction of RNA secondary structure, the program RNAfold was used (version 2.4.14). The ‘target’ secondary structure was converted to a ‘constraint string’ that enforces bases to be paired with other bases, or to be unpaired. Because the triplex is unable to be modeled in RNAfold, the bases involved in the triplex are required to be unpaired in the constraint string, whereas all bases within other stems (pseudoknot, scaffold, and extended stems) were required to be appropriately paired. For guide scaffolds 2 (SEQ ID NO:5), 174 (SEQ ID NO:2238), and 175 (SEQ ID NO:2239), this constraint string was constructed based on sequence alignment between the scaffold and scaffold 1 (SEQ ID NO: 4) outside of the extended stem, which can have minimal sequence identity. Within the extended stem, bases were assumed to be paired according to the predicted secondary structure for the isolated extended stem sequence. See Table 39 for a subset of sequences and their constraint strings.

TABLE 39
Constraint strings to represent the ‘target secondary structure’ in RNAfold algorithm.

| Name | Constraint string |
|---|---|
| Scaffold 1 (w/5′ | (((((.xxx.........xxxxx))))).((.((((((((...))))).)))))...(((((((((((((((. |
| truncation as in | ......))))))))))).))))..xxxxx |
| CryoEM structure) | |
| Scaffold 2 | ....(((((.xxx.........xxxxx.)))))....((((((((...))))).))).....((.(((((((((( |
| | (((......)))))))))))))..))..xxxxx |
| Scaffold 174 | ...(((((.xxx.........xxxxx.)))))....((((((((...)))))..))).....((((((((....)) |
| | ))))))..xxxxx |
| Scaffold 175 | ...(((((.xxx.........xxxxx.)))))....((((((((...))))).))).....((.(((((((((... |
| | .)))))))))..))..xxxxx |

[0450] Secondary structure stability of the ensemble of structures that satisfy the constraint was obtained, using the command: ‘RNAfold-p0--noPS-C’ And taking the ‘free energy of ensemble’ in kcal/mol (ΔG_constraint). The prediction was repeated without the constraint to get the secondary structure stability of the entire ensemble that includes both the target and alternative structures, using the command: ‘RNAfold-p0--noPS’ and taking the ‘free energy of ensemble’ in kcal/mol (ΔG_all).

[0451] The relative stability of the target structure to alternate structures was quantified as the difference between these two ΔG values: ΔΔG=ΔG_constraint−ΔG_all. A sequence with a large value for LAG is predicted to have many competing alternate secondary structures that would make it difficult for the RNA to fold into the target binding-competent structure. A sequence with a low value for ΔΔG is predicted to be more optimal in terms of its ability to fold into a binding-competent secondary structure.

### Results

[0452] A series of new scaffolds was designed to improve scaffold activity based on existing data and new hypotheses. Each new scaffold comprised a set of mutations that, in combination, were predicted to enable higher activity of dsDNA cleavage. These mutations fell into the following categories: First, mutations in the 5′ unstructured region of the scaffold were predicted to increase transcription efficiency or otherwise improve activity of the scaffold. Most commonly, scaffolds had the 5′ “GU” nucleotides deleted (scaffolds 181-220: SEQ ID NOS: 2242-2280). The “U” is the first nucleotide (U1) in the reference sequence SEQ ID NO:5. The G was prepended to increase transcription efficiency by U6 polymerase. However, removal of these two nucleotides was shown, surprisingly, to increase activity (FIG. 66). Additional mutations at the 5′ end include (a) combining the GU deletion with A2G, such that the first transcribed base is the G at position 2 in the reference scaffold (scaffold 199: SEQ ID NO:2259); (b) deleting only U1 and keeping the prepended G (scaffold 200: SEQ ID NO:2260); and (c) deleting the U at position 4, which is predicted to be unstructured and was found to be beneficial when added to scaffold 2 in a high-throughput CRISPRi assay (scaffold 208: SEQ ID NO:2268).

[0453] A second class of mutations was to the extended stem region. The sequence for this region was chosen from three possible options: (a) a “truncated stem loop” which has a shorter loop sequence than the reference sequence extended stem (the scaffolds 64 and 175 contain this extended stem: SEQ ID NOS: 2106 and 2239, respectively) (b) Uvsx hairpin with additional loop-distal mutations [A99] and G65U to fully base-pair the extended stem (the scaffold 174: SEQ ID NO: 2238) contains this extended stem); or (c) an “MS2(U15C)” hairpin with the same additional loop-distal mutations [A99] and G65U as in (b). These three extended stems classes were present in scaffolds with high activity (e.g. see FIG. 65), and their sequences can be found in Table 40.

TABLE 40
Sequences of extended stem regions used in novel scaffolds.

| | | Incorporated in Scaffolds |
|---|---|---|
| Extended stem name | Extended stem sequence | (SEQ ID NO) |
| truncated stem | GCGCUUACGGACUUCGGUCCGUAAG | 2239, 2242-2244, 2246, |
| loop | AAGC (SEQ ID NO: 4226) | 2255-2258 |
| UvsX, -99 G65U | GCUCCCUCUUCGGAGGGAGC (SEQ | 2238, 2245, 2250-2254, |
| | ID NO: 4227) | 2259-2280 |
| MS2(U15C), -99 | GCUCACAUGAGGAUCACCCAUGUGA | 2249 |
| G65U | GC (SEQ ID NO: 4228) | |

[0454] Thirdly, a set of mutations was designed to the triplex loop region. This region was not resolved in the CryoEM structure of CasX 1.1, likely because it does not form base-pairs and thus is more flexible. This region tolerates mutations, with certain mutations having beneficial effects on RNP binding, based on CRISPRi data from scaffold 2 (FIG. 63). The C18G substitution within the triplex loop was already incorporated in the scaffold 174. The following mutations were added to scaffold 174, that were not immediately adjacent to the C18G substitution in order to limit potential negative epistasis between these mutations: \hat{ }U15 (insertion of U before nucleotide 15 in scaffold 2), \hat{ }U17, and C16A (scaffolds 208, 210, and 209: SEQ ID NOS: 2268, 2270, 2269, respectively).

[0455] Fourth, a set of mutations was designed to systematically stabilize the target secondary structure for the scaffold. For background, RNA polymers fold into complex three-dimensional structures that enforce their function. In the CasX RNP, the RNA scaffold forms a structure comprising secondary structure elements such as the pseudoknot stem, a triplex, a scaffold stem-loop, and an extended stem-loop, as evident in the Cryo-EM characterization of the CasX RNP 1.1. These structural elements likely help enforce a three dimensional structure that is competent to bind the CasX protein, and in turn enable conformational transitions necessary for enzymatic function of the RNP. However, an RNA sequence can fold into alternate secondary structures that compete with the formation of the target secondary structure. The propensity of a given sequence to fold into the target versus alternate secondary structures was quantified using computational prediction, similar to the method described in (Jarmoskaite, I., et al. 2019. A quantitative and predictive model for RNA binding by human pumilio proteins. Molecular Cell 74(5), pp. 966-981.e18.) for correcting observed binding equilibrium constants for a distinct protein-RNA interaction, and using RNAfold (Lorenz, R., Bernhart, S. H., Honer Zu Siederdissen, C., et al. 2011. ViennaRNA Package 2.0. Algorithms for Molecular Biology 6, p. 26) to predict secondary structure stability (see Methods).

[0456] A series of mutations were chosen that were predicted to help stabilize the target secondary structure, in the following regions: The pseudoknot is a base-paired stem that forms between the 5′ sequence of the scaffold and sequence 3′ of the triplex and triplex loop. This stem is predicted to comprise 5 base-pairs, 4 of which are canonical Watson-Crick pairs and the fifth is a noncanonical G:A wobble pair. Converting this G:A wobble to a Watson Crick pair is predicted to stabilize alternative secondary structures relative to the target secondary structure (high ΔΔG between target and alternative secondary structure stabilities; Methods). This aberrant stability comes from a set of secondary structures in which the triplex bases are aberrantly paired. However, converting the G to an A or a C (for an A:A wobble or C:A wobble) was predicted to lower the ΔΔG value (G8C or G8A added to scaffolds 174 and 175+C18G). A second set of mutations was in the triplex loop: including a U15C mutation and a C18G mutation (for scaffold 175 that does not already contain this variant). Finally, the linker between the pseudoknot stem and the scaffold stem was mutated at position 35 (U35A), which was again predicted to stabilize the target secondary structure relative to alternatives.

[0457] Scaffolds 189-198 (SEQ ID NOS:2250-2258) included these predicted mutations on top of scaffolds 174 or 175, individually and in combination. The predicted change in ΔΔG for each of these scaffolds is given in Table 41 below. This algorithm predicts a much stronger effect on ΔΔG with combining multiple of these mutations into a single scaffold.

TABLE 41
Predicted effect on target secondary structure stability of incorporating
specific mutations individually or in combination to scaffolds 174 or 175.

| | | | Effect of |
|---|---|---|---|
| | | | mutations(s) ΔΔG_mut- |
| Starting | | Scaffold ΔΔG | ΔΔG_starting_scaffold |
| scaffold | Mutation(s) | (kcal/mol) | (kcal/mol) |
| 174 | — | 0.17 | — |
| 174 | G8A | −0.74 | −0.91 |
| 174 | G8C | −0.32 | −0.49 |
| 174 | U15C | −0.02 | −0.19 |
| 174 | U35A | −0.22 | −0.39 |
| 174 | G8A, U15C, | −1.34 | −1.51 |
| | U35A | | |
| 175 | — | 3.23 | — |
| 175 | G8A | 3.15 | −0.08 |
| 175 | G8C | 3.15 | −0.08 |
| 175 | U35A | 3.07 | −0.16 |
| 175 | U15C | 0.78 | −2.45 |
| 175 | C18G | 0.43 | −2.80 |
| 175 | G8A, T15C, | −1.03 | −4.26 |
| | C18G, T35A | | |

[0458] A fifth set of mutations was designed to test whether the triplex bases could be replaced by an alternate set of three nucleotides that are still able to form triplex pairs (Scaffolds 212-220: SEQ ID NOS:2272-2280). A subset of these substitutions are predicted to prevent formation of alternate secondary structures.

[0459] A sixth set of mutations were designed to change the pseudoknot-triplex boundary nucleotides, which are predicted to have competing effects on transcription efficiency and triplex formation. These include scaffolds 201-206 (SEQ ID NOS:2261-2266).

The application's sequence listing, which the Patent Office published only in electronic form, follows.

SEQUENCE LISTING (4232 sequences)

SEQ ID NO: 1 - protein, 986 aa, Unknown
  Deltaproteobacteria sp.
MEKRINKIRKKLSADNATKPVSRSGPMKTLLVRVMTDDLKKRLEKRRKKPEVMPQVISNNAANNLRMLLDDYTKMKEAILQVYWQEFKDDHVGLMCKFAQPASKKIDQNKLKPEMDEKGNLTTAGFACSQCGQPLFVYKLEQVSEKGKAYTNYFGRCNVAEHEKLILLAQLKPEKDSDEAVTYSLGKFGQRALDFYSIHVTKESTHPVKPLAQIAGNRYASGPVGKALSDACMGTIASFLSKYQDIIIEHQKVVKGNQKRLESLRELAGKENLEYPSVTLPPQPHTKEGVDAYNEVIARVRMWVNLNLWQKLKLSRDDAKPLLRLKGFPSFPVVERRENEVDWWNTINEVKKLIDAKRDMGRVFWSGVTAEKRNTILEGYNYLPNENDHKKREGSLENPKKPAKRQFGDLLLYLEKKYAGDWGKVFDEAWERIDKKIAGLTSHIEREEARNAEDAQSKAVLTDWLRAKASFVLERLKEMDEKEFYACEIQLQKWYGDLRGNPFAVEAENRVVDISGFSIGSDGHSIQYRNLLAWKYLENGKREFYLLMNYGKKGRIRFTDGTDIKKSGKWQGLLYGGGKAKVIDLTFDPDDEQLIILPLAFGTRQGREFIWNDLLSLETGLIKLANGRVIEKTIYNKKIGRDEPALFVALTFERREVVDPSNIKPVNLIGVDRGENIPAVIALTDPEGCPLPEFKDSSGGPTDILRIGEGYKEKQRAIQAAKEVEQRRAGGYSRKFASKSRNLADDMVRNSARDLFYHAVTHDAVLVFENLSRGFGRQGKRTFMTERQYTKMEDWLTAKLAYEGLTSKTYLSKTLAQYTSKTCSNCGFTITTADYDGMLVRLKKTSDGWATTLNNKELKAEGQITYYNRYKRQTVEKELSAELDRLSEESGNNDISKWTKGRRDEALFLLKKRFSHRPVQEQFVCLDCGHEVHADEQAALNIARSWLFLNSNSTEFKSYKSGKQPFVGAWQAFYKRRLKEVWKPNA

SEQ ID NO: 2 - protein, 978 aa, Unknown
  Planctomycetes sp.
MQEIKRINKIRRRLVKDSNTKKAGKTGPMKTLLVRVMTPDLRERLENLRKKPENIPQPISNTSRANLNKLLTDYTEMKKAILHVYWEEFQKDPVGLMSRVAQPAPKNIDQRKLIPVKDGNERLTSSGFACSQCCQPLYVYKLEQVNDKGKPHTNYFGRCNVSEHERLILLSPHKPEANDELVTYSLGKFGQRALDFYSIHVTRESNHPVKPLEQIGGNSCASGPVGKALSDACMGAVASFLTKYQDIILEHQKVIKKNEKRLANLKDIASANGLAFPKITLPPQPHTKEGIEAYNNVVAQIVIWVNLNLWQKLKIGRDEAKPLQRLKGFPSFPLVERQANEVDWWDMVCNVKKLINEKKEDGKVFWQNLAGYKRQEALLPYLSSEEDRKKGKKFARYQFGDLLLHLEKKHGEDWGKVYDEAWERIDKKVEGLSKHIKLEEERRSEDAQSKAALTDWLRAKASFVIEGLKEADKDEFCRCELKLQKWYGDLRGKPFAIEAENSILDISGFSKQYNCAFIWQKDGVKKLNLYLIINYFKGGKLRFKKIKPEAFEANRFYTVINKKSGEIVPMEVNFNFDDPNLIILPLAFGKRQGREFIWNDLLSLETGSLKLANGRVIEKTLYNRRTRQDEPALFVALTFERREVLDSSNIKPMNLIGIDRGENIPAVIALTDPEGCPLSRFKDSLGNPTHILRIGESYKEKQRTIQAAKEVEQRRAGGYSRKYASKAKNLADDMVRNTARDLLYYAVTQDAMLIFENLSRGFGRQGKRTFMAERQYTRMEDWLTAKLAYEGLPSKTYLSKTLAQYTSKTCSNCGFTITSADYDRVLEKLKKTATGWMTTINGKELKVEGQITYYNRYKRQNVVKDLSVELDRLSEESVNNDISSWTKGRSGEALSLLKKRFSHRPVQEKFVCLNCGFETHADEQAALNIARSWLFLRSQEYKKYQTNKTTGNTDKRAFVETWQSFYRKKLKEVWKPAV

SEQ ID NO: 3 - protein, 855 aa, Unknown
  Candidatus Sungbacteria sp.
MDNANKPSTKSLVNTTRISDHFGVTPGQVTRVFSFGIIPTKRQYAIIERWFAAVEAARERLYGMLYAHFQENPPAYLKEKFSYETFFKGRPVLNGLRDIDPTIMTSAVFTALRHKAEGAMAAFHTNHRRLFEEARKKMREYAECLKANEALLRGAADIDWDKIVNALRTRLNTCLAPEYDAVIADFGALCAFRALIAETNALKGAYNHALNQMLPALVKVDEPEEAEESPRLRFFNGRINDLPKFPVAERETPPDTETIIRQLEDMARVIPDTAEILGYIHRIRHKAARRKPGSAVPLPQRVALYCAIRMERNPEEDPSTVAGHFLGEIDRVCEKRRQGLVRTPFDSQIRARYMDIISFRATLAHPDRWTEIQFLRSNAASRRVRAETISAPFEGFSWTSNRTNPAPQYGMALAKDANAPADAPELCICLSPSSAAFSVREKGGDLIYMRPTGGRRGKDNPGKEITWVPGSFDEYPASGVALKLRLYFGRSQARRMLTNKTWGLLSDNPRVFAANAELVGKKRNPQDRWKLFFHMVISGPPPVEYLDFSSDVRSRARTVIGINRGEVNPLAYAVVSVEDGQVLEEGLLGKKEYIDQLIETRRRISEYQSREQTPPRDLRQRVRHLQDTVLGSARAKIHSLIAFWKGILAIERLDDQFHGREQKIIPKKTYLANKTGFMNALSFSGAVRVDKKGNPWGGMIEIYPGGISRTCTQCGTVWLARRPKNPGHRDAMVVIPDIVDDAAATGFDNVDCDAGTVDYGELFTLSREWVRLTPRYSRVMRGTLGDLERAIRQGDDRKSRQMLELALEPQPQWGQFFCHRCGFNGQSDVLAATNLARRAISLIRRLPDTDTPPTP

SEQ ID NO: 4 - RNA, 108 nt, Artificial Sequence
  reference sgRNA
acaucuggcgcguuuauuccauuacuuuggagccagucccagcgacuaugucguauggacgaagcgcuuauuuaucggagagaaaccgauaaguaaaacgcaucaaag

SEQ ID NO: 5 - RNA, 108 nt, Artificial Sequence
  reference sgRNA
uacuggcgcuuuuaucucauuacuuugagagccaucaccagcgacuaugucguauggguaaagcgcuuauuuaucggagagaaauccgauaaauaagaagcaucaaag

SEQ ID NO: 6 - RNA, 81 nt, Artificial Sequence
  tracrRNA sequence
acaucuggcgcguuuauuccauuacuuuggagccagucccagcgacuaugucguauggacgaagcgcuuauuuaucggaga

SEQ ID NO: 7 - RNA, 78 nt, Artificial Sequence
  tracrRNA sequence
acaucuggcgcguuuauuccauuacuuuggagccagucccagcgacuaugucguauggacgaagcgcuuauuuaucgg

SEQ ID NO: 8 - RNA, 80 nt, Artificial Sequence
  tracrRNA sequence
uacuggcgcuuuuaucucauuacuuugagagccaucaccagcgacuaugucguauggguaaagcgcuuauuuaucggaga

SEQ ID NO: 9 - RNA, 77 nt, Artificial Sequence
  tracrRNA sequence
uacuggcgcuuuuaucucauuacuuugagagccaucaccagcgacuaugucguauggguaaagcgcuuauuuaucgg

SEQ ID NO: 10 - RNA, 25 nt, Artificial Sequence
  tracrRNA sequence
guuuacacacucccucucauagggu

SEQ ID NO: 11 - RNA, 25 nt, Artificial Sequence
  tracrRNA sequence
guuuacacacucccucucaugaggu

SEQ ID NO: 12 - RNA, 25 nt, Artificial Sequence
  tracrRNA sequence
uuuuacauacccccucucaugggau

SEQ ID NO: 13 - RNA, 25 nt, Artificial Sequence
  tracrRNA sequence
guuuacacacucccucucauggggg

SEQ ID NO: 14 - RNA, 20 nt, Artificial Sequence
  reference sgRNA
ccagcgacuaugucguaugg

SEQ ID NO: 15 - RNA, 39 nt, Artificial Sequence
  reference sgRNA
gcgcuuauuuaucggagagaaauccgauaaauaagaagc

SEQ ID NO: 16 - RNA, 74 nt, Artificial Sequence
  reference sgRNA
ggcgcuuuuaucucauuacuuugagagccaucaccagcgacuaugucguauggguaaagcgcuuauuuaucgga

SEQ ID NO: 17 - DNA, 14 bp, Artificial Sequence
  sgNA variant
attatctcattact

SEQ ID NO: 18 - DNA, 24 bp, Artificial Sequence
  gNA variant
tccgaggggaccgtcccctcggta

SEQ ID NO: 19 - DNA, 45 bp, Artificial Sequence
  gNA variant
ggccggcatggtcccagcctcctcgctggcgccggctgggaacat

SEQ ID NO: 20 - DNA, 16 bp, Artificial Sequence
  gNA variant
atggcgaatgggaccc

SEQ ID NO: 21 - DNA, 78 bp, Artificial Sequence
  gNA variant
ttttggccggcatggtcccagcctcctcgctggcgccggctgggcaacatgcttcggcatggcgaatgggaccccggg

SEQ ID NO: 22 - DNA, 78 bp, Artificial Sequence
  gNA variant
cccggggtcccattcgccatgccgaagcatgttgcccagccggcgccagcgaggaggctgggaccatgccggccaaaa

SEQ ID NO: 23 - DNA, 98 bp, Artificial Sequence
  sgNA variant
tactggcgcctttatctcattactttgagagccatcaccagcgactatgtcgtatgggtaaagcgcttacggacttcggtccgtaagaagcatcaaag

SEQ ID NO: 24 - DNA, 20 bp, Artificial Sequence
  spacer sequence
gtgtagtacaagagatagaa

SEQ ID NO: 25 - DNA, 20 bp, Artificial Sequence
  spacer sequence
tgaagctgacagcattcggg

SEQ ID NO: 26 - DNA, 20 bp, Artificial Sequence
  spacer sequence
tagatcgagacatgtaagca

SEQ ID NO: 27 - DNA, 20 bp, Artificial Sequence
  spacer sequence
ggccgagatgtctcgctccg

SEQ ID NO: 28 - DNA, 20 bp, Artificial Sequence
  spacer sequence
aggccagaaagagagagtag

SEQ ID NO: 29 - DNA, 20 bp, Artificial Sequence
  spacer sequence
tgtggtcggggtagcggctg

SEQ ID NO: 30 - DNA, 20 bp, Artificial Sequence
  spacer sequence
tcaagtccgccatgcccgaa

SEQ ID NO: 31 - DNA, 20 bp, Artificial Sequence
  spacer sequence
ccagggtgtcgccctcgaac

SEQ ID NO: 32 - DNA, 20 bp, Artificial Sequence
  spacer sequence
tgaccaccctgacctacggc

SEQ ID NO: 33 - DNA, 20 bp, Artificial Sequence
  spacer sequence
tggggcacaagctggagtac

SEQ ID NO: 34 - DNA, 20 bp, Unknown
  spacer sequence
gtcgtgctgcttcatgcaac

SEQ ID NO: 35 - DNA, 20 bp, Unknown
  spacer sequence
gtcgtgctgctttgcatggt

SEQ ID NO: 36 - DNA, 20 bp, Unknown
  spacer sequence
gtcgtgctatcccatgtggt

SEQ ID NO: 37 - DNA, 20 bp, Unknown
  spacer sequence
gtcgcatcgcttcatgtggt

SEQ ID NO: 38 - DNA, 20 bp, Unknown
  spacer sequence
actatgctgcttcatgtggt

SEQ ID NO: 39 - DNA, 20 bp, Unknown
  spacer sequence
gtcgtgctgcttcatacagt

SEQ ID NO: 40 - DNA, 20 bp, Unknown
  spacer sequence
gtcgtgctgctttgcgtggt

SEQ ID NO: 41 - DNA, 20 bp, Unknown
  spacer sequence
gtcgtgctgtcccatgtggt

SEQ ID NO: 42 - DNA, 20 bp, Unknown
  spacer sequence
gtcgtgtcacttcatgtggt

SEQ ID NO: 43 - DNA, 20 bp, Unknown
  spacer sequence
gtcacactgcttcatgtggt

SEQ ID NO: 44 - DNA, 20 bp, Unknown
  spacer sequence
actgtgctgcttcatgtggt

SEQ ID NO: 45 - DNA, 20 bp, Unknown
  spacer sequence
gtcgtgctgcttcatgtgac

SEQ ID NO: 46 - DNA, 20 bp, Unknown
  spacer sequence
gtcgtgctgcttcatgcagt

SEQ ID NO: 47 - DNA, 20 bp, Unknown
  spacer sequence
gtcgtgctgcttcacatggt

SEQ ID NO: 48 - DNA, 20 bp, Unknown
  spacer sequence
gtcgtgctgctttgtgtggt

SEQ ID NO: 49 - DNA, 20 bp, Unknown
  spacer sequence
gtcgtgctgccccatgtggt

SEQ ID NO: 50 - DNA, 20 bp, Unknown
  spacer sequence
gtcgtgctatttcatgtggt

SEQ ID NO: 51 - DNA, 20 bp, Unknown
  spacer sequence
gtcgtgtcgcttcatgtggt

SEQ ID NO: 52 - DNA, 20 bp, Unknown
  spacer sequence
gtcgcactgcttcatgtggt

SEQ ID NO: 53 - DNA, 20 bp, Unknown
  spacer sequence
gttatgctgcttcatgtggt

SEQ ID NO: 54 - DNA, 20 bp, Unknown
  spacer sequence
accgtgctgcttcatgtggt

SEQ ID NO: 55 - DNA, 20 bp, Unknown
  spacer sequence
gtcgtgctgcttcatgtgat

SEQ ID NO: 56 - DNA, 20 bp, Unknown
  spacer sequence
gtcgtgctgcttcatgcggt

SEQ ID NO: 57 - DNA, 20 bp, Unknown
  spacer sequence
gtcgtgctgcttcacgtggt

SEQ ID NO: 58 - DNA, 20 bp, Unknown
  spacer sequence
gtcgtgctgctttatgtggt

SEQ ID NO: 59 - DNA, 20 bp, Unknown
  spacer sequence
gtcgtgctgcctcatgtggt

SEQ ID NO: 60 - DNA, 20 bp, Unknown
  spacer sequence
gtcgtgctacttcatgtggt

SEQ ID NO: 61 - DNA, 20 bp, Unknown
  spacer sequence
gtcgtgttgcttcatgtggt

SEQ ID NO: 62 - DNA, 20 bp, Unknown
  spacer sequence
gtcgcgctgcttcatgtggt

SEQ ID NO: 63 - DNA, 20 bp, Unknown
  spacer sequence
gttgtgctgcttcatgtggt

SEQ ID NO: 64 - DNA, 20 bp, Unknown
  spacer sequence
atcgtgctgcttcatgtggt

SEQ ID NO: 65 - DNA, 20 bp, Unknown
  spacer sequence
gtcgtgctgcttcatgtggt

SEQ ID NO: 66 - DNA, 23 bp, Unknown
  spacer sequence
gaagtcgtgctgcttcatgtaac

SEQ ID NO: 67 - DNA, 23 bp, Unknown
  spacer sequence
gaagtcgtgctgcttcgcacggt

SEQ ID NO: 68 - DNA, 23 bp, Unknown
  spacer sequence
gaagtcgtgctgtcctatgtggt

SEQ ID NO: 69 - DNA, 23 bp, Unknown
  spacer sequence
gaagtcgtatcacttcatgtggt

SEQ ID NO: 70 - DNA, 23 bp, Unknown
  spacer sequence
gaagctacgctgcttcatgtggt

SEQ ID NO: 71 - DNA, 23 bp, Unknown
  spacer sequence
aggatcgtgctgcttcatgtggt

SEQ ID NO: 72 - DNA, 23 bp, Unknown
  spacer sequence
gaagtcgtgctgcttcatgtgac

SEQ ID NO: 73 - DNA, 23 bp, Unknown
  spacer sequence
gaagtcgtgctgcttcatacagt

SEQ ID NO: 74 - DNA, 23 bp, Unknown
  spacer sequence
gaagtcgtgctgctttgcgtggt

SEQ ID NO: 75 - DNA, 23 bp, Unknown
  spacer sequence
gaagtcgtgctgtcccatgtggt

SEQ ID NO: 76 - DNA, 23 bp, Unknown
  spacer sequence
gaagtcgtgtcacttcatgtggt

SEQ ID NO: 77 - DNA, 23 bp, Unknown
  spacer sequence
gaagtcacactgcttcatgtggt

SEQ ID NO: 78 - DNA, 23 bp, Unknown
  spacer sequence
gaaactgtgctgcttcatgtggt

SEQ ID NO: 79 - DNA, 23 bp, Unknown
  spacer sequence
agggtcgtgctgcttcatgtggt

SEQ ID NO: 80 - DNA, 23 bp, Unknown
  spacer sequence
gaagtcgtgctgcttcatgtaat

SEQ ID NO: 81 - DNA, 23 bp, Unknown
  spacer sequence
gaagtcgtgctgcttcatacggt

SEQ ID NO: 82 - DNA, 23 bp, Unknown
  spacer sequence
gaagtcgtgctgcttcgcgtggt

SEQ ID NO: 83 - DNA, 23 bp, Unknown
  spacer sequence
gaagtcgtgctgctctatgtggt

SEQ ID NO: 84 - DNA, 23 bp, Unknown
  spacer sequence
gaagtcgtgctgtctcatgtggt

SEQ ID NO: 85 - DNA, 23 bp, Unknown
  spacer sequence
gaagtcgtgccacttcatgtggt

SEQ ID NO: 86 - DNA, 23 bp, Unknown
  spacer sequence
gaagtcgtattgcttcatgtggt

SEQ ID NO: 87 - DNA, 23 bp, Unknown
  spacer sequence
gaagtcacgctgcttcatgtggt

SEQ ID NO: 88 - DNA, 23 bp, Unknown
  spacer sequence
gaagctgtgctgcttcatgtggt

SEQ ID NO: 89 - DNA, 23 bp, Unknown
  spacer sequence
gagatcgtgctgcttcatgtggt

SEQ ID NO: 90 - DNA, 23 bp, Unknown
  spacer sequence
agagtcgtgctgcttcatgtggt

SEQ ID NO: 91 - DNA, 23 bp, Unknown
  spacer sequence
gaagtcgtgctgcttcatgtggc

SEQ ID NO: 92 - DNA, 23 bp, Unknown
  spacer sequence
gaagtcgtgctgcttcatgtagt

SEQ ID NO: 93 - DNA, 23 bp, Unknown
  spacer sequence
gaagtcgtgctgcttcatatggt

SEQ ID NO: 94 - DNA, 23 bp, Unknown
  spacer sequence
gaagtcgtgctgcttcgtgtggt

SEQ ID NO: 95 - DNA, 23 bp, Unknown
  spacer sequence
gaagtcgtgctgctccatgtggt

SEQ ID NO: 96 - DNA, 23 bp, Unknown
  spacer sequence
gaagtcgtgctgtttcatgtggt

SEQ ID NO: 97 - DNA, 23 bp, Unknown
  spacer sequence
gaagtcgtgccgcttcatgtggt

SEQ ID NO: 98 - DNA, 23 bp, Unknown
  spacer sequence
gaagtcgtactgcttcatgtggt

SEQ ID NO: 99 - DNA, 23 bp, Unknown
  spacer sequence
gaagtcatgctgcttcatgtggt

SEQ ID NO: 100 - DNA, 23 bp, Unknown
  spacer sequence
gaagccgtgctgcttcatgtggt

SEQ ID NO: 101 - DNA, 23 bp, Unknown
  spacer sequence
gaggtcgtgctgcttcatgtggt

SEQ ID NO: 102 - DNA, 23 bp, Unknown
  spacer sequence
aaagtcgtgctgcttcatgtggt

SEQ ID NO: 103 - DNA, 23 bp, Unknown
  spacer sequence
gaagtcgtgctgcttcatgtggt

SEQ ID NO: 104 - DNA, 20 bp, Unknown
  spacer sequence
agggcgacaccctggtaggt

SEQ ID NO: 105 - DNA, 20 bp, Unknown
  spacer sequence
agggcgacaccccaacgaac

SEQ ID NO: 106 - DNA, 20 bp, Unknown
  spacer sequence
agggcgacgttttggtgaac

SEQ ID NO: 107 - DNA, 20 bp, Unknown
  spacer sequence
agggtagtaccctggtgaac

SEQ ID NO: 108 - DNA, 20 bp, Unknown
  spacer sequence
gaaacgacaccctggtgaac

SEQ ID NO: 109 - DNA, 20 bp, Unknown
  spacer sequence
agggcgacaccctggcagac

SEQ ID NO: 110 - DNA, 20 bp, Unknown
  spacer sequence
agggcgacaccccaatgaac

SEQ ID NO: 111 - DNA, 20 bp, Unknown
  spacer sequence
agggcgacattttggtgaac

SEQ ID NO: 112 - DNA, 20 bp, Unknown
  spacer sequence
agggcggtgccctggtgaac

SEQ ID NO: 113 - DNA, 20 bp, Unknown
  spacer sequence
aggataacaccctggtgaac

SEQ ID NO: 114 - DNA, 20 bp, Unknown
  spacer sequence
gaagcgacaccctggtgaac

SEQ ID NO: 115 - DNA, 20 bp, Unknown
  spacer sequence
agggcgacaccctggtgagt

SEQ ID NO: 116 - DNA, 20 bp, Unknown
  spacer sequence
agggcgacaccctggtagac

SEQ ID NO: 117 - DNA, 20 bp, Unknown
  spacer sequence
agggcgacaccctgacgaac

SEQ ID NO: 118 - DNA, 20 bp, Unknown
  spacer sequence
agggcgacaccccagtgaac

SEQ ID NO: 119 - DNA, 20 bp, Unknown
  spacer sequence
agggcgacactttggtgaac

SEQ ID NO: 120 - DNA, 20 bp, Unknown
  spacer sequence
agggcgacgtcctggtgaac

SEQ ID NO: 121 - DNA, 20 bp, Unknown
  spacer sequence
agggcggtaccctggtgaac

SEQ ID NO: 122 - DNA, 20 bp, Unknown
  spacer sequence
agggtaacaccctggtgaac

SEQ ID NO: 123 - DNA, 20 bp, Unknown
  spacer sequence
agaacgacaccctggtgaac

SEQ ID NO: 124 - DNA, 20 bp, Unknown
  spacer sequence
gaggcgacaccctggtgaac

SEQ ID NO: 125 - DNA, 20 bp, Unknown
  spacer sequence
agggcgacaccctggtgagc

SEQ ID NO: 126 - DNA, 20 bp, Unknown
  spacer sequence
agggcgacaccctggtaaac

SEQ ID NO: 127 - DNA, 20 bp, Unknown
  spacer sequence
agggcgacaccctgatgaac

SEQ ID NO: 128 - DNA, 20 bp, Unknown
  spacer sequence
agggcgacaccccggtgaac

SEQ ID NO: 129 - DNA, 20 bp, Unknown
  spacer sequence
agggcgacactctggtgaac

SEQ ID NO: 130 - DNA, 20 bp, Unknown
  spacer sequence
agggcgacgccctggtgaac

SEQ ID NO: 131 - DNA, 20 bp, Unknown
  spacer sequence
agggcggcaccctggtgaac

SEQ ID NO: 132 - DNA, 20 bp, Unknown
  spacer sequence
agggtgacaccctggtgaac

SEQ ID NO: 133 - DNA, 20 bp, Unknown
  spacer sequence
agagcgacaccctggtgaac

SEQ ID NO: 134 - DNA, 20 bp, Unknown
  spacer sequence
ggggcgacaccctggtgaac

SEQ ID NO: 135 - DNA, 20 bp, Unknown
  spacer sequence
agggcgacaccctggtgaac

SEQ ID NO: 136 - DNA, 20 bp, Unknown
  spacer sequence
gaagttcgagggtagtaccc

SEQ ID NO: 137 - DNA, 20 bp, Unknown
  spacer sequence
gaagttcggaaacgacaccc

SEQ ID NO: 138 - DNA, 20 bp, Unknown
  spacer sequence
gaagcctaagggcgacaccc

SEQ ID NO: 139 - DNA, 20 bp, Unknown
  spacer sequence
aggattcgagggcgacaccc

SEQ ID NO: 140 - DNA, 20 bp, Unknown
  spacer sequence
gaagttcgagggcgatgtcc

SEQ ID NO: 141 - DNA, 20 bp, Unknown
  spacer sequence
gaagttcgagggtagcaccc

SEQ ID NO: 142 - DNA, 20 bp, Unknown
  spacer sequence
gaagttcgaaaacgacaccc

SEQ ID NO: 143 - DNA, 20 bp, Unknown
  spacer sequence
gaagtttaggggcgacaccc

SEQ ID NO: 144 - DNA, 20 bp, Unknown
  spacer sequence
gaaacccgagggcgacaccc

SEQ ID NO: 145 - DNA, 20 bp, Unknown
  spacer sequence
agggttcgagggcgacaccc

SEQ ID NO: 146 - DNA, 20 bp, Unknown
  spacer sequence
gaagttcgagggcgacactt

SEQ ID NO: 147 - DNA, 20 bp, Unknown
  spacer sequence
gaagttcgagggcgacgtcc

SEQ ID NO: 148 - DNA, 20 bp, Unknown
  spacer sequence
gaagttcgagggcggtaccc

SEQ ID NO: 149 - DNA, 20 bp, Unknown
  spacer sequence
gaagttcgagggtaacaccc

SEQ ID NO: 150 - DNA, 20 bp, Unknown
  spacer sequence
gaagttcgagaacgacaccc

SEQ ID NO: 151 - DNA, 20 bp, Unknown
  spacer sequence
gaagttcggaggcgacaccc

SEQ ID NO: 152 - DNA, 20 bp, Unknown
  spacer sequence
gaagtttaagggcgacaccc

SEQ ID NO: 153 - DNA, 20 bp, Unknown
  spacer sequence
gaagcccgagggcgacaccc

SEQ ID NO: 154 - DNA, 20 bp, Unknown
  spacer sequence
gagattcgagggcgacaccc

SEQ ID NO: 155 - DNA, 20 bp, Unknown
  spacer sequence
agagttcgagggcgacaccc

SEQ ID NO: 156 - DNA, 20 bp, Unknown
  spacer sequence
gaagttcgagggcgacactc

SEQ ID NO: 157 - DNA, 20 bp, Unknown
  spacer sequence
gaagttcgagggcgacgccc

SEQ ID NO: 158 - DNA, 20 bp, Unknown
  spacer sequence
gaagttcgagggcggcaccc

SEQ ID NO: 159 - DNA, 20 bp, Unknown
  spacer sequence
gaagttcgagggtgacaccc

SEQ ID NO: 160 - DNA, 20 bp, Unknown
  spacer sequence
gaagttcgagagcgacaccc

SEQ ID NO: 161 - DNA, 20 bp, Unknown
  spacer sequence
gaagttcgggggcgacaccc

SEQ ID NO: 162 - DNA, 20 bp, Unknown
  spacer sequence
gaagtttgagggcgacaccc

SEQ ID NO: 163 - DNA, 20 bp, Unknown
  spacer sequence
gaagctcgagggcgacaccc

SEQ ID NO: 164 - DNA, 20 bp, Unknown
  spacer sequence
gaggttcgagggcgacaccc

SEQ ID NO: 165 - DNA, 20 bp, Unknown
  spacer sequence
aaagttcgagggcgacaccc

SEQ ID NO: 166 - DNA, 20 bp, Unknown
  spacer sequence
gaagttcgagggcgacaccc

SEQ ID NO: 167 - DNA, 23 bp, Unknown
  spacer sequence
tcgccctcgaacttcacctcaat

SEQ ID NO: 168 - DNA, 24 bp, Unknown
  spacer sequence
tcgccctcgaacttcattcctggc

SEQ ID NO: 169 - DNA, 23 bp, Unknown
  spacer sequence
tcgccctcgaaccctgcctcggc

SEQ ID NO: 170 - DNA, 23 bp, Unknown
  spacer sequence
tcgccctcaggtttcacctcggc

SEQ ID NO: 171 - DNA, 23 bp, Unknown
  spacer sequence
tcgcttctgaacttcacctcggc

SEQ ID NO: 172 - DNA, 23 bp, Unknown
  spacer sequence
ctatcctcgaacttcacctcggc

SEQ ID NO: 173 - DNA, 23 bp, Unknown
  spacer sequence
tcgccctcgaacttcacctcgat

SEQ ID NO: 174 - DNA, 23 bp, Unknown
  spacer sequence
tcgccctcgaacttcaccctagc

SEQ ID NO: 175 - DNA, 23 bp, Unknown
  spacer sequence
tcgccctcgaacttcgtttcggc

SEQ ID NO: 176 - DNA, 23 bp, Unknown
  spacer sequence
tcgccctcgaaccctacctcggc

SEQ ID NO: 177 - DNA, 23 bp, Unknown
  spacer sequence
tcgccctcgggtttcacctcggc

SEQ ID NO: 178 - DNA, 23 bp, Unknown
  spacer sequence
tcgcccctaaacttcacctcggc

SEQ ID NO: 179 - DNA, 23 bp, Unknown
  spacer sequence
tcgttttcgaacttcacctcggc

SEQ ID NO: 180 - DNA, 23 bp, Unknown
  spacer sequence
ctaccctcgaacttcacctcggc

SEQ ID NO: 181 - DNA, 23 bp, Unknown
  spacer sequence
tcgccctcgaacttcacctcaac

SEQ ID NO: 182 - DNA, 23 bp, Unknown
  spacer sequence
tcgccctcgaacttcaccctggc

SEQ ID NO: 183 - DNA, 23 bp, Unknown
  spacer sequence
tcgccctcgaacttcatttcggc

SEQ ID NO: 184 - DNA, 23 bp, Unknown
  spacer sequence
tcgccctcgaactttgcctcggc

SEQ ID NO: 185 - DNA, 23 bp, Unknown
  spacer sequence
tcgccctcgaaccccacctcggc

SEQ ID NO: 186 - DNA, 23 bp, Unknown
  spacer sequence
tcgccctcgagtttcacctcggc

SEQ ID NO: 187 - DNA, 23 bp, Unknown
  spacer sequence
tcgccctcagacttcacctcggc

SEQ ID NO: 188 - DNA, 23 bp, Unknown
  spacer sequence
tcgcccctgaacttcacctcggc

SEQ ID NO: 189 - DNA, 23 bp, Unknown
  spacer sequence
tcgctttcgaacttcacctcggc

SEQ ID NO: 190 - DNA, 23 bp, Unknown
  spacer sequence
tcatcctcgaacttcacctcggc

SEQ ID NO: 191 - DNA, 23 bp, Unknown
  spacer sequence
ctgccctcgaacttcacctcggc

SEQ ID NO: 192 - DNA, 23 bp, Unknown
  spacer sequence
tcgccctcgaacttcacctcggt

SEQ ID NO: 193 - DNA, 23 bp, Unknown
  spacer sequence
tcgccctcgaacttcacctcagc

SEQ ID NO: 194 - DNA, 23 bp, Unknown
  spacer sequence
tcgccctcgaacttcaccccggc

SEQ ID NO: 195 - DNA, 23 bp, Unknown
  spacer sequence
tcgccctcgaacttcatctcggc

SEQ ID NO: 196 - DNA, 23 bp, Unknown
  spacer sequence
tcgccctcgaactttacctcggc

SEQ ID NO: 197 - DNA, 23 bp, Unknown
  spacer sequence
tcgccctcgaacctcacctcggc

SEQ ID NO: 198 - DNA, 23 bp, Unknown
  spacer sequence
tcgccctcgagcttcacctcggc

SEQ ID NO: 199 - DNA, 23 bp, Unknown
  spacer sequence
tcgccctcaaacttcacctcggc

SEQ ID NO: 200 - DNA, 23 bp, Unknown
  spacer sequence
tcgcccccgaacttcacctcggc

SEQ ID NO: 201 - DNA, 23 bp, Unknown
  spacer sequence
tcgctctcgaacttcacctcggc

SEQ ID NO: 202 - DNA, 23 bp, Unknown
  spacer sequence
tcaccctcgaacttcacctcggc

SEQ ID NO: 203 - DNA, 23 bp, Unknown
  spacer sequence
ccgccctcgaacttcacctcggc

SEQ ID NO: 204 - DNA, 23 bp, Unknown
  spacer sequence
tcgccctcgaacttcacctcggc

SEQ ID NO: 205 - DNA, 20 bp, Unknown
  spacer sequence
tgtggtcggggtagcgatca

SEQ ID NO: 206 - DNA, 20 bp, Unknown
  spacer sequence
tgtggtcggggtgatagctg

SEQ ID NO: 207 - DNA, 20 bp, Unknown
  spacer sequence
tgtggtcgaaacagcggctg

SEQ ID NO: 208 - DNA, 20 bp, Unknown
  spacer sequence
tgtgactagggtagcggctg

SEQ ID NO: 209 - DNA, 20 bp, Unknown
  spacer sequence
cacagtcggggtagcggctg

SEQ ID NO: 210 - DNA, 20 bp, Unknown
  spacer sequence
tgtggtcggggtagcaattg

SEQ ID NO: 211 - DNA, 20 bp, Unknown
  spacer sequence
tgtggtcggggtgatggctg

SEQ ID NO: 212 - DNA, 20 bp, Unknown
  spacer sequence
tgtggtcggaacagcggctg

SEQ ID NO: 213 - DNA, 20 bp, Unknown
  spacer sequence
tgtggttaaggtagcggctg

SEQ ID NO: 214 - DNA, 20 bp, Unknown
  spacer sequence
tgtaaccggggtagcggctg

SEQ ID NO: 215 - DNA, 20 bp, Unknown
  spacer sequence
cacggtcggggtagcggctg

SEQ ID NO: 216 - DNA, 20 bp, Unknown
  spacer sequence
tgtggtcggggtagcggcca

SEQ ID NO: 217 - DNA, 20 bp, Unknown
  spacer sequence
tgtggtcggggtagcgattg

SEQ ID NO: 218 - DNA, 20 bp, Unknown
  spacer sequence
tgtggtcggggtagtagctg

SEQ ID NO: 219 - DNA, 20 bp, Unknown
  spacer sequence
tgtggtcggggtgacggctg

SEQ ID NO: 220 - DNA, 20 bp, Unknown
  spacer sequence
tgtggtcgggacagcggctg

SEQ ID NO: 221 - DNA, 20 bp, Unknown
  spacer sequence
tgtggtcgaagtagcggctg

SEQ ID NO: 222 - DNA, 20 bp, Unknown
  spacer sequence
tgtggttagggtagcggctg

SEQ ID NO: 223 - DNA, 20 bp, Unknown
  spacer sequence
tgtgaccggggtagcggctg

SEQ ID NO: 224 - DNA, 20 bp, Unknown
  spacer sequence
tgcagtcggggtagcggctg

SEQ ID NO: 225 - DNA, 20 bp, Unknown
  spacer sequence
catggtcggggtagcggctg

SEQ ID NO: 226 - DNA, 20 bp, Unknown
  spacer sequence
tgtggtcggggtagcggccg

SEQ ID NO: 227 - DNA, 20 bp, Unknown
  spacer sequence
tgtggtcggggtagcgactg

SEQ ID NO: 228 - DNA, 20 bp, Unknown
  spacer sequence
tgtggtcggggtagtggctg

SEQ ID NO: 229 - DNA, 20 bp, Unknown
  spacer sequence
tgtggtcggggtggcggctg

SEQ ID NO: 230 - DNA, 20 bp, Unknown
  spacer sequence
tgtggtcgggatagcggctg

SEQ ID NO: 231 - DNA, 20 bp, Unknown
  spacer sequence
tgtggtcgaggtagcggctg

SEQ ID NO: 232 - DNA, 20 bp, Unknown
  spacer sequence
tgtggttggggtagcggctg

SEQ ID NO: 233 - DNA, 20 bp, Unknown
  spacer sequence
tgtgatcggggtagcggctg

SEQ ID NO: 234 - DNA, 20 bp, Unknown
  spacer sequence
tgcggtcggggtagcggctg

SEQ ID NO: 235 - DNA, 20 bp, Unknown
  spacer sequence
cgtggtcggggtagcggctg

SEQ ID NO: 236 - DNA, 20 bp, Unknown
  spacer sequence
tgtggtcggggtagcggctg

SEQ ID NO: 237 - RNA, 26 nt, Unknown
  scaffold stem loop of an exemplary reference sgRNA
ccaucaccagcgacuaugucguaugg

SEQ ID NO: 238 - RNA, 46 nt, Unknown
  extended stem loop sequence of an exemplary reference sgRNA
guaaacgcuuauuuaucggagagaaauccgauaaauaagaagcauc

SEQ ID NO: 239 - RNA, 68 nt, Unknown
  Deltaproteobacter sp.
uuauuccauuacuuuggagccagucccagcgacuaugucguauggacgaagcgcuuauuuaucggaga

SEQ ID NO: 240 - RNA, 65 nt, Unknown
  Deltaproteobacter sp.
uuauuccauuacuuuggagccagucccagcgacuaugucguauggacgaagcgcuuauuuaucgg

SEQ ID NO: 241 - RNA, 23 nt, Unknown
  Deltaproteobacter sp.
ccgauaaguaaaacgcaucaaag

SEQ ID NO: 242 - RNA, 69 nt, Unknown
  Planctomycetes sp.
uuaucucauuacuuugagagccaucaccagcgacuaugucguauggguaaagcgcuuauuuaucggaga

SEQ ID NO: 243 - RNA, 66 nt, Unknown
  Planctomycetes sp.
uuaucucauuacuuugagagccaucaccagcgacuaugucguauggguaaagcgcuuauuuaucgg

SEQ ID NO: 244 - RNA, 26 nt, Unknown
  Planctomycetes sp.
ucuccgauaaauaagaagcaucaaag

SEQ ID NO: 245 - RNA, 230 nt, Unknown
  Candidatus Sungbacteria sp.
uaaauuuuuugagcccuaucuccgcgaggaagacagggcucuuuucaugagaggaagcuuuuauacccgaccgguaauccggucgggggauuggccguugaaacgauuuuaaagcggccaaugggccccucuauauggauacuacuuauauaaggagcuuggggaagaagauagcuuaaucccgcuaucuugucaagggguugggggaguaucaguauccggcaggcgcc

SEQ ID NO: 246 - RNA, 24 nt, Unknown
  Candidatus Sungbacteria sp.
guuuacacacucccucucauaggg

SEQ ID NO: 247 - DNA, 47 bp, Artificial Sequence
  TTC protospacer adjacent motif
  misc_feature (1)..(2): n is any nucleotide
  misc_feature (6)..(47): n is any nucleotide
  misc_feature (21)..(42): These individual nucleotides may be absent
nnttcnnnnnnnnnnnnnnnnnnnnnnnnnnnnnnnnnnnnnnnnnn

SEQ ID NO: 248 - DNA, 47 bp, Artificial Sequence
  CTC protospacer adjacent motif
  misc_feature (1)..(2): n is any nucleotide
  misc_feature (6)..(47): n is any nucleotide
  misc_feature (21)..(42): These individual nucleotides may be absent
nnctcnnnnnnnnnnnnnnnnnnnnnnnnnnnnnnnnnnnnnnnnnn

SEQ ID NO: 249 - DNA, 47 bp, Artificial Sequence
  GTC protospacer adjacent motif
  misc_feature (1)..(2): n is any nucleotide
  misc_feature (6)..(47): n is any nucleotide
  misc_feature (21)..(42): These individual nucleotides may be absent
nngtcnnnnnnnnnnnnnnnnnnnnnnnnnnnnnnnnnnnnnnnnnn

SEQ ID NO: 250 - DNA, 47 bp, Artificial Sequence
  ATC protospacer adjacent motif
  misc_feature (1)..(2): n is any nucleotide
  misc_feature (6)..(47): n is any nucleotide
  misc_feature (21)..(42): These individual nucleotides may be absent
nnatcnnnnnnnnnnnnnnnnnnnnnnnnnnnnnnnnnnnnnnnnnn

SEQ ID NO: 251 - DNA, 47 bp, Artificial Sequence
  TC protospacer adjacent motif
  misc_feature (1)..(3): n is any nucleotide
  misc_feature (6)..(47): n is any nucleotide
  misc_feature (21)..(42): These individual nucleotides may be absent
nnntcnnnnnnnnnnnnnnnnnnnnnnnnnnnnnnnnnnnnnnnnnn

SEQ ID NO: 252 - protein, 978 aa, Artificial Sequence
  CasX variant
MQEIKRINKIRRRLVKDSNTKKAGKTGPMKTLLVRVMTPDLRERLENLRKKPENIPQPISNTSRANLNKLLTDYTEMKKAILHVYWEEFQKDPVGLMSRVAQPASKKIDQNKLKPEMDEKGNLTTAGFACSQCGQPLFVYKLEQVSEKGKAYTNYFGRCNVAEHEKLILLAQLKPEKDSDEAVTYSLGKFGQRALDFYSIHVTRESNHPVKPLEQIGGNSCASGPVGKALSDACMGAVASFLTKYQDIILEHQKVIKKNEKRLANLKDIASANGLAFPKITLPPQPHTKEGIEAYNNVVAQIVIWVNLNLWQKLKIGRDEAKPLQRLKGFPSFPLVERQANEVDWWDMVCNVKKLINEKKEDGKVFWQNLAGYKRQEALRPYLSSEEDRKKGKKFARYQFGDLLLHLEKKHGEDWGKVYDEAWERIDKKVEGLSKHIKLEEERRSEDAQSKAALTDWLRAKASFVIEGLKEADKDEFCRCELKLQKWYGDLRGKPFAIEAENSILDISGFSKQYNCAFIWQKDGVKKLNLYLIINYFKGGKLRFKKIKPEAFEANRFYTVINKKSGEIVPMEVNFNFDDPNLIILPLAFGKRQGREFIWNDLLSLETGSLKLANGRVIEKTLYNRRTRQDEPALFVALTFERREVLDSSNIKPMNLIGIDRGENIPAVIALTDPEGCPLSRFKDSLGNPTHILRIGESYKEKQRTIQAKKEVEQRRAGGYSRKYASKAKNLADDMVRNTARDLLYYAVTQDAMLIFENLSRGFGRQGKRTFMAERQYTRMEDWLTAKLAYEGLSKTYLSKTLAQYTSKTCSNCGFTITSADYDRVLEKLKKTATGWMTTINGKELKVEGQITYYNRYKRQNVVKDLSVELDRLSEESVNNDISSWTKGRSGEALSLLKKRFSHRPVQEKFVCLNCGFETHADEQAALNIARSWLFLRSQEYKKYQTNKTTGNTDKRAFVETWQSFYRKKLKEVWKPAV

SEQ ID NO: 253 - protein, 977 aa, Artificial Sequence
  CasX variant
MQEIKRINKIRRRLVKDSNTKKAGKTGPMKTLLVRVMTPDLRERLENLRKKPENIPQPISNTSRANLNKLLTDYTEMKKAILHVYWEEFQKDPVGLMSRVAQPAPKNIDQRKLIPVKDGNERLTSSGFACSQCCQPLYVYKLEQVNDKGKPHTNYFGRCNVSEHERLILLSPHKPEANDELVTYSLGKFGQRALDFYSIHVTRESNHPVKPLEQIGGNSCASGPVGKALSDACMGAVASFLTKYQDIILEHQKVIKKNEKRLANLKDIASANGLAFPKITLPPQPHTKEGIEAYNNVVAQIVIWVNLNLWQKLKIGRDEAKPLQRLKGFPSFPLVERQANEVDWWDMVCNVKKLINEKKEDGKVFWQNLAGYKRQEALRPYLSSEEDRKKGKKFARYQFGDLLLHLEKKHGEDWGKVYDEAWERIDKKVEGLSKHIKLEEERRSEDAQSKAALTDWLRAKASFVIEGLKEADKDEFCRCELKLQKWYGDLRGKPFAIEAENSILDISGFSKQYNCAFIWQKDGVKKLNLYLIINYFKGGKLRFKKIKPEAFEANRFYTVINKKSGEIVPMEVNFNFDDPNLIILPLAFGKRQGREFIWNDLLSLETGSLKLANGRVIEKTLYNRRTRQDEPALFVALTFERREVLDSSNIKPMNLIGIDRGENIPAVIALTDPEGCPLSRFKDSLGNPTHILRIGESYKEKQRTIQAKKEVEQRRAGGYSRKYASKAKNLADDMVRNTARDLLYYAVTQDAMLIFENLSRGFGRQGKRTFMAERQYTRMEDWLTAKLAYEGLSKTYLSKTLAQYTSKTCSNCGFTITTADYDGMLVRLKKTSDGWATTLNNKELKAEGQITYYNRYKRQTVEKELSAELDRLSEESGNNDISKWTKGRRDEALFLLKKRFSHRPVQEQFVCLDCGHEVHADEQAALNIARSWLFLRSQEYKKYQTNKTTGNTDKRAFVETWQSFYRKKLKEVWKPAV

SEQ ID NO: 254 - protein, 985 aa, Artificial Sequence
  CasX variant
MEKRINKIRKKLSADNATKPVSRSGPMKTLLVRVMTDDLKKRLEKRRKKPEVMPQVISNNAANNLRMLLDDYTKMKEAILQVYWQEFKDDHVGLMCKFAQPAPKNIDQRKLIPVKDGNERLTSSGFACSQCCQPLYVYKLEQVNDKGKPHTNYFGRCNVSEHERLILLSPHKPEANDELVTYSLGKFGQRALDFYSIHVTKESTHPVKPLAQIAGNRYASGPVGKALSDACMGTIASFLSKYQDIIIEHQKVVKGNQKRLESLRELAGKENLEYPSVTLPPQPHTKEGVDAYNEVIARVRMWVNLNLWQKLKLSRDDAKPLLRLKGFPSFPVVERRENEVDWWNTINEVKKLIDAKRDMGRVFWSGVTAEKRNTILEGYNYLPNENDHKKREGSLENPKKPAKRQFGDLLLYLEKKYAGDWGKVFDEAWERIDKKIAGLTSHIEREEARNAEDAQSKAVLTDWLRAKASFVLERLKEMDEKEFYACEIQLQKWYGDLRGNPFAVEAENRVVDISGFSIGSDGHSIQYRNLLAWKYLENGKREFYLLMNYGKKGRIRFTDGTDIKKSGKWQGLLYGGGKAKVIDLTFDPDDEQLIILPLAFGTRQGREFIWNDLLSLETGLIKLANGRVIEKTIYNKKIGRDEPALFVALTFERREVVDPSNIKPVNLIGVDRGENIPAVIALTDPEGCPLPEFKDSSGGPTDILRIGEGYKEKQRAIQAAKEVEQRRAGGYSRKFASKSRNLADDMVRNSARDLFYHAVTHDAVLVFENLSRGFGRQGKRTFMTERQYTKMEDWLTAKLAYEGLTSKTYLSKTLAQYTSKTCSNCGFTITTADYDGMLVRLKKTSDGWATTLNNKELKAEGQITYYNRYKRQTVEKELSAELDRLSEESGNNDISKWTKGRRDEALFLLKKRFSHRPVQEQFVCLDCGHEVHADEQAALNIARSWLFLNSNSTEFKSYKSGKQPFVGAWQAFYKRRLKEVWKPNA

SEQ ID NO: 255 - protein, 986 aa, Artificial Sequence
  CasX variant
MEKRINKIRKKLSADNATKPVSRSGPMKTLLVRVMTDDLKKRLEKRRKKPEVMPQVISNNAANNLRMLLDDYTKMKEAILQVYWQEFKDDHVGLMCKFAQPASKKIDQNKLKPEMDEKGNLTTAGFACSQCGQPLFVYKLEQVSEKGKAYTNYFGRCNVAEHEKLILLAQLKPEKDSDEAVTYSLGKFGQRALDFYSIHVTKESTHPVKPLAQIAGNRYASGPVGKALSDACMGTIASFLSKYQDIIIEHQKVVKGNQKRLESLRELAGKENLEYPSVTLPPQPHTKEGVDAYNEVIARVRMWVNLNLWQKLKLSRDDAKPLLRLKGFPSFPVVERRENEVDWWNTINEVKKLIDAKRDMGRVFWSGVTAEKRNTILEGYNYLPNENDHKKREGSLENPKKPAKRQFGDLLLYLEKKYAGDWGKVFDEAWERIDKKIAGLTSHIEREEARNAEDAQSKAVLTDWLRAKASFVLERLKEMDEKEFYACEIQLQKWYGDLRGNPFAVEAENRVVDISGFSIGSDGHSIQYRNLLAWKYLENGKREFYLLMNYGKKGRIRFTDGTDIKKSGKWQGLLYGGGKAKVIDLTFDPDDEQLIILPLAFGTRQGREFIWNDLLSLETGLIKLANGRVIEKTIYNKKIGRDEPALFVALTFERREVVDPSNIKPVNLIGVDRGENIPAVIALTDPEGCPLPEFKDSSGGPTDILRIGEGYKEKQRAIQAAKEVEQRRAGGYSRKFASKSRNLADDMVRNSARDLFYHAVTHDAVLVFENLSRGFGRQGKRTFMTERQYTKMEDWLTAKLAYEGLTSKTYLSKTLAQYTSKTCSNCGFTITSADYDRVLEKLKKTATGWMTTINGKELKVEGQITYYNRYKRQNVVKDLSVELDRLSEESVNNDISSWTKGRSGEALSLLKKRFSHRPVQEKFVCLNCGFETHADEQAALNIARSWLFLNSNSTEFKSYKSGKQPFVGAWQAFYKRRLKEVWKPNA

SEQ ID NO: 256 - protein, 921 aa, Artificial Sequence
  CasX variant
MQEIKRINKIRRRLVKDSNTKKAGKTGPMKTLLVRVMTPDLRERLENLRKKPENIPQPISNTSRANLNKLLTDYTEMKKAILHVYWEEFQKDPVGLMSRVAQPAPKNIDQRKLIPVKDGNERLTSSGFACSQCCQPLYVYKLEQVNDKGKPHTNYFGRCNVSEHERLILLSPHKPEANDELVTYSLGKFGQRALDFYSIHVTRESNHPVKPLEQIGGNSCASGPVGKALSDACMGAVASFLTKYQDIILEHQKVIKKNEKRLANLKDIASANGLAFPKITLPPQPHTKEGIEAYNNVVAQIVIWVNLNLWQKLKIGRDEAKPLQRLKGFPSFPLVERQANEVDWWDMVCNVKKLINEKKEDGKVFWQNLAGYKRQEALRPYLSSEEDRKKGKKFARYQFGDLLLHLEKKHGEDWGKVYDEAWERIDKKVEGLSKHIKLEEERRSEDAQSKAALTDWLRAKASFVIEGLKEADKDEFCRCELKLQKWYGDLRGKPFAIEAENSILDISGFSKQYNCAFIWQKDGVKKLNLYLIINYFKGGKLRFKKIKPEAFEANRFYTVINKKSGEIVPMEVNFNFDDPNLIILPLAFGKRQGREFIWNDLLSLETGSLKLANGRVIEKTLYNRRTRQDEPALFVALTFERREVLDSSNIKPVNLIGVDRGENIPAVIALTDPEGCPLPEFKDSSGGPTDILRIGEGYKEKQRAIQAAKEVEQRRAGGYSRKFASKSRNLADDMVRNSARDLFYHAVTHDAVLVFENLSRGFGRQGKRTFMTERQYTKMEDWLTAKLAYEGLTSKTYLSKTLAQYTSKTCSNCGFTITSADYDRVLEKLKKTATGWMTTINGKELKVEGQITYYNRYKRQNVVKDLSVELDRLSEESVNNDISSWTKGRSGEALSLLKKRFSHRPVQEKFVCLNCGFETHA

SEQ ID NO: 257 - protein, 920 aa, Artificial Sequence
  CasX variant
MQEIKRINKIRRRLVKDSNTKKAGKTGPMKTLLVRVMTPDLRERLENLRKKPENIPQPISNTSRANLNKLLTDYTEMKKAILHVYWEEFQKDPVGLMSRVAQPAPKNIDQRKLIPVKDGNERLTSSGFACSQCCQPLYVYKLEQVNDKGKPHTNYFGRCNVSEHERLILLSPHKPEANDELVTYSLGKFGQRALDFYSIHVTRESNHPVKPLEQIGGNSCASGPVGKALSDACMGAVASFLTKYQDIILEHQKVIKKNEKRLANLKDIASANGLAFPKITLPPQPHTKEGIEAYNNVVAQIVIWVNLNLWQKLKIGRDEAKPLQRLKGFPSFPLVERQANEVDWWDMVCNVKKLINEKKEDGKVFWQNLAGYKRQEALRPYLSSEEDRKKGKKFARYQFGDLLLHLEKKHGEDWGKVYDEAWERIDKKVEGLSKHIKLEEERRSEDAQSKAALTDWLRAKASFVIEGLKEADKDEFCRCELKLQKWYGDLRGKPFAIEAENSILDISGFSKQYNCAFIWQKDGVKKLNLYLIINYFKGGKLRFKKIKPEAFEANRFYTVINKKSGEIVPMEVNFNFDDPNLIILPLAFGKRQGREFIWNDLLSLETGSLKLANGRVIEKTLYNRRTRQDEPALFVALTFERREVLDSSNIKPMNLIGIDRGENIPAVIALTDPEGCPLSRFKDSLGNPTHILRIGESYKEKQRTIQAKKEVEQRRAGGYSRKYASKAKNLADDMVRNTARDLLYYAVTQDAMLIFENLSRGFGRQGKRTFMAERQYTRMEDWLTAKLAYEGLSKTYLSKTLAQYTSKTCSNCGFTITSADYDRVLEKLKKTATGWMTTINGKELKVEGQITYYNRYKRQNVVKDLSVELDRLSEESVNNDISSWTKGRSGEALSLLKKRFSHRPVQEKFVCLNCGFETHA

SEQ ID NO: 258 - protein, 977 aa, Artificial Sequence
  CasX variant
MQEIKRINKIRRRLVKDSNTKKAGKTGPMKTLLVRVMTPDLRERLENLRKKPENIPQPISNNAANNLRMLLDDYTKMKEAILQVYWQEFKDDHVGLMCKFAQPAPKNIDQRKLIPVKDGNERLTSSGFACSQCCQPLYVYKLEQVNDKGKPHTNYFGRCNVSEHERLILLSPHKPEANDELVTYSLGKFGQRALDFYSIHVTKESTHPVKPLAQIAGNRYASGPVGKALSDACMGTIASFLSKYQDIIIEHQKVVKGNQKRLESLRELAGKENLEYPSVTLPPQPHTKEGVDAYNEVIARVRMWVNLNLWQKLKLSRDDAKPLLRLKGFPSFPLVERQANEVDWWDMVCNVKKLINEKKEDGKVFWQNLAGYKRQEALRPYLSSEEDRKKGKKFARYQFGDLLLHLEKKHGEDWGKVYDEAWERIDKKVEGLSKHIKLEEERRSEDAQSKAALTDWLRAKASFVIEGLKEADKDEFCRCELKLQKWYGDLRGKPFAIEAENSILDISGFSKQYNCAFIWQKDGVKKLNLYLIINYFKGGKLRFKKIKPEAFEANRFYTVINKKSGEIVPMEVNFNFDDPNLIILPLAFGKRQGREFIWNDLLSLETGSLKLANGRVIEKTLYNRRTRQDEPALFVALTFERREVLDSSNIKPMNLIGIDRGENIPAVIALTDPEGCPLSRFKDSLGNPTHILRIGESYKEKQRTIQAKKEVEQRRAGGYSRKYASKAKNLADDMVRNTARDLLYYAVTQDAMLIFENLSRGFGRQGKRTFMAERQYTRMEDWLTAKLAYEGLSKTYLSKTLAQYTSKTCSNCGFTITSADYDRVLEKLKKTATGWMTTINGKELKVEGQITYYNRYKRQNVVKDLSVELDRLSEESVNNDISSWTKGRSGEALSLLKKRFSHRPVQEKFVCLNCGFETHADEQAALNIARSWLFLRSQEYKKYQTNKTTGNTDKRAFVETWQSFYRKKLKEVWKPAV

SEQ ID NO: 259 - protein, 986 aa, Artificial Sequence
  CasX variant
MQEIKRINKIRRRLVKDSNTKKAGKTGPMKTLLVRVMTPDLRERLENLRKKPENIPQPISNTSRANLNKLLTDYTEMKKAILHVYWEEFQKDPVGLMSRVAQPAPKNIDQRKLIPVKDGNERLTSSGFACSQCCQPLYVYKLEQVNDKGKPHTNYFGRCNVSEHERLILLSPHKPEANDELVTYSLGKFGQRALDFYSIHVTRESNHPVKPLEQIGGNSCASGPVGKALSDACMGAVASFLTKYQDIILEHQKVIKKNEKRLANLKDIASANGLAFPKITLPPQPHTKEGIEAYNNVVAQIVIWVNLNLWQKLKIGRDEAKPLQRLKGFPSFPVVERRENEVDWWNTINEVKKLIDAKRDMGRVFWSGVTAEKRNTILEGYNYLPNENDHKKREGSLENPKKPAKRQFGDLLLYLEKKYAGDWGKVFDEAWERIDKKIAGLTSHIEREEARNAEDAQSKAVLTDWLRAKASFVLERLKEMDEKEFYACEIQLQKWYGDLRGNPFAVEAENSILDISGFSKQYNCAFIWQKDGVKKLNLYLIINYFKGGKLRFKKIKPEAFEANRFYTVINKKSGEIVPMEVNFNFDDPNLIILPLAFGKRQGREFIWNDLLSLETGSLKLANGRVIEKTLYNRRTRQDEPALFVALTFERREVLDSSNIKPMNLIGIDRGENIPAVIALTDPEGCPLSRFKDSLGNPTHILRIGESYKEKQRTIQAKKEVEQRRAGGYSRKYASKAKNLADDMVRNTARDLLYYAVTQDAMLIFENLSRGFGRQGKRTFMAERQYTRMEDWLTAKLAYEGLSKTYLSKTLAQYTSKTCSNCGFTITSADYDRVLEKLKKTATGWMTTINGKELKVEGQITYYNRYKRQNVVKDLSVELDRLSEESVNNDISSWTKGRSGEALSLLKKRFSHRPVQEKFVCLNCGFETHADEQAALNIARSWLFLRSQEYKKYQTNKTTGNTDKRAFVETWQSFYRKKLKEVWKPAV

SEQ ID NO: 260 - protein, 925 aa, Artificial Sequence
  CasX variant
MISNTSRANLNKLLTDYTEMKKAILHVYWEEFQKDPVGLMSRVAQPAPKNIDQRKLIPVKDGNERLTSSGFACSQCCQPLYVYKLEQVNDKGKPHTNYFGRCNVSEHERLILLSPHKPEANDELVTYSLGKFGQRALDFYSIHVTRESNHPVKPLEQIGGNSCASGPVGKALSDACMGAVASFLTKYQDIILEHQKVIKKNEKRLANLKDIASANGLAFPKITLPPQPHTKEGIEAYNNVVAQIVIWVNLNLWQKLKIGRDEAKPLQRLKGFPSFPLVERQANEVDWWDMVCNVKKLINEKKEDGKVFWQNLAGYKRQEALRPYLSSEEDRKKGKKFARYQFGDLLLHLEKKHGEDWGKVYDEAWERIDKKVEGLSKHIKLEEERRSEDAQSKAALTDWLRAKASFVIEGLKEADKDEFCRCELKLQKWYGDLRGKPFAIEAENRVVDISGFSIGSDGHSIQYRNLLAWKYLENGKREFYLLMNYGKKGRIRFTDGTDIKKSGKWQGLLYGGGKAKVIDLTFDPDDEQLIILPLAFGTRQGREFIWNDLLSLETGLIKLANGRVIEKTIYNKKIGRDEPALFVALTFERREVVDPSNIKPMNLIGIDRGENIPAVIALTDPEGCPLSRFKDSLGNPTHILRIGESYKEKQRTIQAKKEVEQRRAGGYSRKYASKAKNLADDMVRNTARDLLYYAVTQDAMLIFENLSRGFGRQGKRTFMAERQYTRMEDWLTAKLAYEGLSKTYLSKTLAQYTSKTCSNCGFTITSADYDRVLEKLKKTATGWMTTINGKELKVEGQITYYNRYKRQNVVKDLSVELDRLSEESVNNDISSWTKGRSGEALSLLKKRFSHRPVQEKFVCLNCGFETHADEQAALNIARSWLFLRSQEYKKYQTNKTTGNTDKRAFVETWQSFYRKKLKEVWKPAV

SEQ ID NO: 261 - protein, 975 aa, Artificial Sequence
  CasX variant
MEKRINKIRKKLSADNATKPVSRSGPMKTLLVRVMTDDLKKRLEKRRKKPEVMPQVISNTSRANLNKLLTDYTEMKKAILHVYWEEFQKDPVGLMSRVAQPAPKNIDQRKLIPVKDGNERLTSSGFACSQCCQPLYVYKLEQVNDKGKPHTNYFGRCNVSEHERLILLSPHKPEANDELVTYSLGKFGQRALDFYSIHVTRESNHPVKPLEQIGGNSCASGPVGKALSDACMGAVASFLTKYQDIILEHQKVIKKNEKRLANLKDIASANGLAFPKITLPPQPHTKEGIEAYNNVVAQIVIWVNLNLWQKLKIGRDEAKPLQRLKGFPSFPLVERQANEVDWWDMVCNVKKLINEKKEDGKVFWQNLAGYKRQEALRPYLSSEEDRKKGKKFARYQFGDLLLHLEKKHGEDWGKVYDEAWERIDKKVEGLSKHIKLEEERRSEDAQSKAALTDWLRAKASFVIEGLKEADKDEFCRCELKLQKWYGDLRGKPFAIEAENSILDISGFSKQYNCAFIWQKDGVKKLNLYLIINYFKGGKLRFKKIKPEAFEANRFYTVINKKSGEIVPMEVNFNFDDPNLIILPLAFGKRQGREFIWNDLLSLETGSLKLANGRVIEKTLYNRRTRQDEPALFVALTFERREVLDSSNIKPMNLIGIDRGENIPAVIALTDPEGCPLSRFKDSLGNPTHILRIGESYKEKQRTIQAKKEVEQRRAGGYSRKYASKAKNLADDMVRNTARDLLYYAVTQDAMLIFENLSRGFGRQGKRTFMAERQYTRMEDWLTAKLAYEGLSKTYLSKTLAQYTSKTCSNCGFTITSADYDRVLEKLKKTATGWMTTINGKELKVEGQITYYNRYKRQNVVKDLSVELDRLSEESVNNDISSWTKGRSGEALSLLKKRFSHRPVQEKFVCLNCGFETHADEQAALNIARSWLFLRSQEYKKYQTNKTTGNTDKRAFVETWQSFYRKKLKEVWKPAV

SEQ ID NO: 262 - protein, 982 aa, Artificial Sequence
  CasX variant
MQEIKRINKIRRRLVKDSNTKKAGKTGPMKTLLVRVMTPDLRERLENLRKKPENIPQPISNTSRANLNKLLTDYTEMKKAILHVYWEEFQKDPVGLMSRVAQPAPKNIDQRKLIPVKDGNERLTSSGFACSQCCQPLYVYKLEQVNDKGKPHTNYFGRCNVSEHERLILLSPHKPEANDELVTYSLGKFGQRALDFYSIHVTRESNHPVKPLEQIGGNSCASGPVGKALSDACMGAVASFLTKYQDIILEHQKVIKKNEKRLANLKDIASANGLAFPKITLPPQPHTKEGIEAYNNVVAQIVIWVNLNLWQKLKIGRDEAKPLQRLKGFPSFPLVERQANEVDWWDMVCNVKKLINEKKEDGKVFWQNLAGYKRQEALRPYLSSEEDRKKGKKFARYQFGDLLLHLEKKHGEDWGKVYDEAWERIDKKVEGLSKHIKLEEERRSEDAQSKAALTDWLRAKASFVIEGLKEADKDEFCRCELKLQKWYGDLRGKPFAIEAENRVVDISGFSIGSDGHSIQYRNLLAWKYLENGKREFYLLMNYGKKGRIRFTDGTDIKKSGKWQGLLYGGGKAKVIDLTFDPDDEQLIILPLAFGTRQGREFIWNDLLSLETGLIKLANGRVIEKTIYNKKIGRDEPALFVALTFERREVVDPSNIKPMNLIGIDRGENIPAVIALTDPEGCPLSRFKDSLGNPTHILRIGESYKEKQRTIQAKKEVEQRRAGGYSRKYASKAKNLADDMVRNTARDLLYYAVTQDAMLIFENLSRGFGRQGKRTFMAERQYTRMEDWLTAKLAYEGLSKTYLSKTLAQYTSKTCSNCGFTITSADYDRVLEKLKKTATGWMTTINGKELKVEGQITYYNRYKRQNVVKDLSVELDRLSEESVNNDISSWTKGRSGEALSLLKKRFSHRPVQEKFVCLNCGFETHADEQAALNIARSWLFLRSQEYKKYQTNKTTGNTDKRAFVETWQSFYRKKLKEVWKPAV

SEQ ID NO: 263 - protein, 977 aa, Artificial Sequence
  CasX variant
MQEIKRINKIRRRLVKDSNTKKAGKTGPMKTLLVRVMTPDLRERLENLRKKPENIPQPISNTSRANLNKLLTDYTEMKKAILHVYWEEFQKDPVGLMSRVAQPAPKNIDQRKLIPVKDGNERLTSSGFACSQCCQPLYVYKLEQVNDKGKPHTNYFGRCNVSEHERLILLSPHKPEANDELVTYSLGKFGQRALDFYSIHVTRESNHPVKPLEQIGGNSCASGPVGKALSDACMGAVASFLTKYQDIILEHQKVIKKNEKRLANLKDIASANGLAFPKITLPPQPHTKEGIEAYNNVVAQIVIWVNLNLWQKLKIGRDEAKPLQRLKGFPSFPLVERQANEVDWWDMVCNVKKLINEKKEDGKVFWQNLAGYKRQEALRPYLSSEEDRKKGKKFARYQFGDLLLHLEKKHGEDWGKVYDEAWERIDKKVEGLSKHIKLEEERRSEDAQSKAALTDWLRAKASFVIEGLKEADKDEFKRCELKLQKWYGDLRGKPFAIEAENSILDISGFSKQYNCAFIWQKDGVKKLNLYLIINYFKGGKLRFKKIKPEAFEANRFYTVINKKSGEIVPMEVNFNFDDPNLIILPLAFGKRQGREFIWNDLLSLETGSLKLANGRVIEKPLYNRRTRQDEPALFVALTFERREVLDSSNIKPMNLIGIDRGENIPAVIALTDPEGCPLSRFKDSLGNPTHILRIGESYKEKQRTIQAKKEVEQRRAGGYSRKYASKAKNLADDMVRNTARDLLYYAVTQDAMLIFENLSRGFGRQGKRTFMAERQYTRMEDWLTAKLAYEGLSKTYLSKTLAQYTSKTCSNCGFTITSADYDRVLEKLKKTATGWMTTINGKELKVEGQITYYNRYKRQNVVKDLSVELDRLSEESVNNDISSWTKGRSGEALSLLKKRFSHRPVQEKFVCLNCGFETHADEQAALNIARSWLFLRSQEYKKYQTNKTTGNTDKRAFVETWQSFYRKKLKEVWKPAV

SEQ ID NO: 264 - protein, 977 aa, Artificial Sequence
  CasX variant
MQEIKRINKIRRRLVKDSNTKKAGKTGPMKTLLVRVMTPDLRERLENLRKKPENIPQPISNTSRANLNKLLTDYTEMKKAILHVYWEEFQKDPVGLMSRVAQPAPKNIDQRKLIPVKDGNERLTSSGFACSQCCQPLYVYKLEQVNDKGKPHTNYFGRCNVSEHERLILLSPHKPEANDELVTYSLGKFGQRALDFYSIHVTRESNHPVKPLEQIGGNSCASGPVGKALSDACMGAVASFLTKYQDIILEHQKVIKKNEKRLANLKDIASANGLAFPKITLPPQPHTKEGIEAYNNVVAQIVIWVNLNLWQKLKIGRDEAKPLQRLKGFPSFPLVERQANEVDWWDMVCNVKKLINEKKEDGKVFWQNLAGYKRQEALLPYLSSEEDRKKGKKFARYQFGDLLLHLEKKHGEDWGKVYDEAWERIDKKVEGLSKHIKLEEERRSEDAQSKAALTDWLRAKASFVIEGLKEADKDEFCRCELKLQKWYGDLRGKPFAIEAENSILDISGFSKQYNCAFIWQKDGVKKLNLYLIINYFKGGKLRFKKIKPEAFEANRFYTVINKKSGEIVPMEVNFNFDDPNLIILPLAFGKRQGREFIWNDLLSLETGSLKLANGRVIEKTLYNRRTRQDEPALFVALTFERREVLDSSNIKPMNLIGIDRGENIPAVIALTDPEGCPLSRFKDSLGNPTHILRIGESYKEKQRTIQAAKEVEQRRAGGYSRKYASKAKNLADDMVRNTARDLLYYAVTQDAMLIFENLSRGFGRQGKRTFAAERQYTRMEDWLTAKLAYEGLPSKTYLSKTLAQYTSKTCSNCGFTITSADYDRVLEKLKKTATGWMTTINGKELKVEGQITYYNRYKRQNVVKDLSVELDRLSEESVNNDISSWTKGRSGEALSLLKKRFSHRPVQEKFVCLNCGFETHADEQAALNIARSWLFLRSQEYKKYQTNKTTGNTDKRAFVETWQSFYRKKLKEVWKPA

SEQ ID NO: 265 - protein, 977 aa, Artificial Sequence
  CasX variant
MQEIKRINKIRRRLVKDSNTKKAGKTGPMKTLLVRVMTPDLRERLENLRKKPENIPQPISNTSRANLNKLLTDYTEMKKAILHVYWEEFQKDPVGLMSRVAQPAPKNIDQRKLIPVKDGNERLTSSGFACSQCCQPLYVYKLEQVNDKGKPHTNYFGRCNVSEHERLILLSPHKPEANDELVTYSLGKFGQRALDFYSIHVTRESNHPVKPLEQIGGNSCASGPVGKALSDACMGAVASFLTKYQDIILEHQKVIKKNEKRLANLKDIASANGLAFPKITLPPQPHTKEGIEAYNNVVAQIVIWVNLNLWQKLKIGRDEAKPLQRLKGFPSFPLVERQANEVDWWDMVCNVKKLINEKKEDGKVFWQNLAGYKRQEALRPYLSSEEDRKKGKKFARYQFGDLLLHLEKKHGEDWGKVYDEAWERIDKKVEGLSKHIKLEEERRSEDAQSKAALTDWLRAKASFVIEGLKEADKDEFCRCELKLQKWYGDLRGKPFAIEAENSILDISGFSKQYNCAFIWQKDGVKKLNLYLIINYFKGGKLRFKKIKPEAFEANRFYTVINKKSGEIVPMEVNFNFDDPNLIILPLAFGKRQGREFIWNDLLSLETGSLKLANGRVIEKTLYNRRTRQDEPALFVALTFERREVLDSSNIKPMNLIGIDRGENIPAVIALTDPEGCPLSRFKDSLGNPTHILRIGESYKEKQRTIQAKKEVEQRRAGGYSRKYASKAKNLANDMVRNTARDLLYYAVTQDAMLIFENLSRGFGRQGKRTFMAERQYTRMEDWLTAKLAYEGLSKTYLSKTLAQYTSKTCSNCGFTITSADYDRVLEKLKKTATGWMTTINGKELKVEGQITYYNRYKRQNVVKDLSVELDRLSEESVNNDISSWTKGRSGEALSLLKKRFSHRPVQEKFVCLNCGFETHADEQAALNIARSWLFLRSQEYKKYQTNKTTGNTDKRAFVETWQSFYRKKLKEVWKPAV

SEQ ID NO: 266 - protein, 978 aa, Artificial Sequence
  CasX variant
MQEIKRINKIRRRLVKDSNTKKAGKTGPMKTLLVRVMTPDLRERLENLRKKPENIPQPISNTSRANLNKLLTDYTEMKKAILHVYWEEFQKDPVGLMSRVAQPAPKNIDQRKLIPVKDGNERLTSSGFACSQCCQPLYVYKLEQVNDKGKPHTNYFGRCNVSEHERLILLSPHKPEANDELVTYSLGKFGQRALDFYSIHVTRESNHPVKPLEQIGGNSCASGPVGKALSDACMGAVASFLTKYQDIILEHQKVIKKNEKRLANLKDIASANGLAFPKITLPPQPHTKEGIEAYNNVVAQIVIWVNLNLWQKLKIGRDEAKPLQRLKGFPSFPLVERQANEVDWWDMVCNVKKLINEKKEDGKVFWQNLAGYKRQEALLPYLSSEEDRKKGKKFARYQFGDLLLHLEKKHGEDWGKVYDEAWERIDKKVEGLSKHIKLEEERRSEDAQSKAALTDWLRAKASFVIEGLKEADKDEFCRCELKLQKWYGDLRGKPFAIEAENSILDISGFSKQYNCAFIWQKDGVKKLNLYLIINYFKGGKLRFKKIKPEAFEANRFYTVINKKSGEIVPMEVNFNFDDPNLIILPLAFGKRQGREFIWNDLLSLETGSLKLANGRVIEKTLYNRRTRQDEPALFVALTFERREVLDSSNIKPMNLIGIDRGENIPAVIALTDPEGCPLSRFKDSLGNPTHILRIGESYKEKQRTIQAAKEVEQRRAGGYSRKYASKAKNLADDMVRNTARDLLYYAVTQDAMLIFENLSRGFGRQGKRTFMAERQYTRMEDQLTAKLAYEGLPSKTYLSKTLAQYTSKTCSNCGFTITSADYDRVLEKLKKTATGWMTTINGKELKVEGQITYYNRYKRQNVVKDLSVELDRLSEESVNNDISSWTKGRSGEALSLLKKRFSHRPVQEKFVCLNCGFETHADEQAALNIARSWLFLRSQEYKKYQTNKTTGNTDKRAFVETWQSFYRKKLKEVWKPAV

SEQ ID NO: 267 - protein, 978 aa, Artificial Sequence
  CasX variant
MQEIKRINKIRRRLVKDSNTKKAGKTGPMKTLLVRVMTPDLRERLENLRKKPENIPQPISNTSRANLNKLLTDYTEMKKAILHVYWEEFQKDPVGLMSRVAQPAPKNIDQRKLIPVKDGNERLTSSGFACSQCCQPLYVYKLEQVNDKGKPHTNYFGRCNVSEHERLILLSPHKPEANDELVTYSLGKFGQRALDFYSIHVTRESNHPVKPLEQIGGNSCASGPVGKALSDACMGAVASFLTKYQDIILEHQKVIKKNEKRLANLKDIASANGLAFPKITLPPQPHTKEGIEAYNNVVAQIVIWVNLNLWQKLKIGRDEAKPLQRLKGFPSFPLVERQANEVDWWDMVCNVKKLINEKKEDGKVFWQNLAGYKRQEALLPYLSSEEDRKKGKKFARYQFGDLLLHLEKKHGEDWGKVYDEAWERIDKKVEGLSKHIKLEEERRSEDAQSKAALTDWLRAKASFVIEGLKEADKDEFCRCELKLQKWYGDLRGKPFAIEAENSILDISGFSKQYNCAFIWQKDGVKKLNLYLIINYFKGGKLRFKKIKPEAFEANRFYTVINKKSGEIVPMEVNFNFDDPNLIILPLAFGKRQGREFIWNDLLSLETGSLKLANGRVIEKTLYNRRTRQDEPALFVALTFERREVLDSSNIKPMNLIGIDRGENIPAVIALTDPEGCPLSRFKDSLGNPTHILRIGESYKEKQRTIQAAKEVEQRRAGGYSRKYASKAKNLADDMVRNTARDLLYYAVTQDAMLIFENLSRGFGRQGKRTFQAERQYTRMEDWLTAKLAYEGLPSKTYLSKTLAQYTSKTCSNCGFTITSADYDRVLEKLKKTATGWMTTINGKELKVEGQITYYNRYKRQNVVKDLSVELDRLSEESVNNDISSWTKGRSGEALSLLKKRFSHRPVQEKFVCLNCGFETHADEQAALNIARSWLFLRSQEYKKYQTNKTTGNTDKRAFVETWQSFYRKKLKEVWKPAV

SEQ ID NO: 268 - protein, 978 aa, Artificial Sequence
  CasX variant
MQEIKRINKIRRRLVKDSNTKKAGKTGPMKTLLVRVMTPDLRERLENLRKKPENIPQPISNTSRANLNKLLTDYTEMKKAILHVYWEEFQKDPVGLMSRVAQPAPKNIDQRKLIPVKDGNERLTSSGFACSQCCQPLYVYKLEQVNDKGKPHTNYFGRCNVSEHERLILLSPHKPEANDELVTYSLGKFGQRALDFYSIHVTRESNHPVKPLEQIGGNSCASGPVGKALSDACMGAVASFLTKYQDIILEHQKVIKKNEKRLANLKDIASANGLAFPKITLPPQPHTKEGIEAYNNVVAQIVIWVNLNLWQKLKIGRDEAKPLQRLKGFPSFPLVERQANEVDWWDMVCNVKKLINEKKEDGKVFWQNLAGYKRQEALLPYLSSEEDRKKGKKFARYQFGDLLLHLEKKHGEDWGKVYDEAWERIDKKVEGLSKHIKLEEERRSEDAQSKAALTDWLIAKASFVIEGLKEADKDEFCRCELKLQKWYGDLRGKPFAIEAENSILDISGFSKQYNCAFIWQKDGVKKLNLYLIINYFKGGKLRFKKIKPEAFEANRFYTVINKKSGEIVPMEVNFNFDDPNLIILPLAFGKRQGREFIWNDLLSLETGSLKLANGRVIEKTLYNRRTRQDEPALFVALTFERREVLDSSNIKPMNLIGIDRGENIPAVIALTDPEGCPLSRFKDSLGNPTHILRIGESYKEKQRTIQAAKEVEQRRAGGYSRKYASKAKNLADDMVRNTVRDLLYYAVTQDAMLIFENLSRGFGRQGKRTFMAERQYTRMEDWLTAKLAYEGLPSKTYLSKTLAQYTSKTCSNCGFTITSADYDRVLEKLKKTATGWMTTINGKELKVEGQITYYNRYKRQNVVKDLSVELDRLSEESVNNDISSWTKGRSGEALSLLKKRFSHRPVQEKFVCLNCGFETHADEQAALNIARSWLFLRSQEYKKYQTNKTTGNTDKRAFVETWQSFYRKKLKEVWKPAV

SEQ ID NO: 269 - protein, 977 aa, Artificial Sequence
  CasX variant
MQEIKRINKIRRRLVKDSNTKKAGKTGPMKTLLVRVMTPDLRERLENLRKKPENIPQPISNTSRANLNKLLTDYTEMKKAILHVYWEEFQKDPVGLMSRVAQPAPKNIDQRKLIPVKDGNERLTSSGFACSQCCQPLYVYKLEQVNDKGKPHTNYFGRCNVSEHERLILLSPHKPEANDELVTYSLGKFGQRALDFYSIHVTRESNHPVKPLEQIGGNSCASGPVGKALSDACMGAVASFLTKYQDIILEHQKVIKKNEKRLANLKDIASANGLAFPKITLPPQPHTKEGIEAYNNVVAQIVIWVNLNLWQKLKIGRDEAKPLQRLKGFPSFPLVERQANEVDWWDMVCNVKKLINEKKEDGKVFWQNLAGYKRQEALRPYLSSEEDRKKGKKFARYQFGDLLLHLEKKHGEDWGKVYDEAWERIDKKVEGLSKHIKLEEERRSEDAQSKAALTDWLRAKASFVIEGLKEADKDEFCRCELKLQKWYGDLRGKPFAIEAENSILDISGFSKQYNCAFIWQKDGVKKLNLYLIINYFKGGKLRFKKIKPEAFEANRFYTVINKKSGEIVPMEVNFNFDDPNLIILPLAFGKRQGREFIWNDLLSLETGSLKLANGRVIEKTLYNRRTRQDEPALFVALTFERREVLDSSNIKPMNLIGIDRGENIPAVIALTDPEGCPLSRFKDSLGNPTHILRIGESYKEKQRTIQAKKEVEQRRAGGYSRKYASKAKNLADDMVRNTARDLLYYAVTQDAMLIFENLSRGFGRQGKRTFNAERQYTRMEDWLTAKLAYEGLSKTYLSKTLAQYTSKTCSNCGFTITSADYDRVLEKLKKTATGWMTTINGKELKVEGQITYYNRYKRQNVVKDLSVELDRLSEESVNNDISSWTKGRSGEALSLLKKRFSHRPVQEKFVCLNCGFETHADEQAALNIARSWLFLRSQEYKKYQTNKTTGNTDKRAFVETWQSFYRKKLKEVWKPAV

SEQ ID NO: 270 - protein, 977 aa, Artificial Sequence
  CasX variant
MQEIKRINKIRRRLVKDSNTKKAGKTGPMKTLLVRVMTPDLRERLENLRKKPENIPQPISNTSRANLNKLLTDYTEMKKAILHVYWEEFQKDPVGLMSRVAQPAPKNIDQRKLIPVKDGNERLTSSGFACSQCCQPLYVYKLEQVNDKGKPHTNYFGRCNVSEHERLILLSPHKPEANDELVTYSLGKFGQRALDFYSIHVTRESNHPVKPLEQIGGNSCASGPVGKALSDACMGAVASFLTKYQDIILEHQKVIKKNEKRLANLKDIASANGLAFPKITLPPQPHTKEGIEAYNNVVAQIVIWVNLNLWQKLKIGRDEAKPLQRLKGFPSFPLVERQANEVDWWDMVCNVKKLINEKKEDGKVFWQNLAGYKRQEALRPYLSSEEDRKKGKKFARYQFGDLLLHLEKKHGEDWGKVYDEAWERIDKKVEGLSKHIKLEEERRSEDAQSKAALTDWLRAKASFVIEGLKEADKDEFCRCELKLQKWYGDLRGKPFAIEAENSILDISGFSKQYNCAFIWQKDGVKKLNLYLIINYFKGGKLRFKKIKPEAFEANRFYTVINKKSGEIVPMEVNFNFDDPNLIILPLAFGKRQGREFIWNDLLSLETGSLKLANGRVIEKTLYNRRTRQDEPALFVALTFERREVLDSSNIKPMNLIGIDRGENIPAVIALTDPEGCPLSRFKDSLGNPTHILRIGESYKEKQRTIQAKKEVEQRRAGGYSRKYASKAKNLADDMVRNTTRDLLYYAVTQDAMLIFENLSRGFGRQGKRTFMAERQYTRMEDWLTAKLAYEGLSKTYLSKTLAQYTSKTCSNCGFTITSADYDRVLEKLKKTATGWMTTINGKELKVEGQITYYNRYKRQNVVKDLSVELDRLSEESVNNDISSWTKGRSGEALSLLKKRFSHRPVQEKFVCLNCGFETHADEQAALNIARSWLFLRSQEYKKYQTNKTTGNTDKRAFVETWQSFYRKKLKEVWKPAV

SEQ ID NO: 271 - protein, 977 aa, Artificial Sequence
  CasX variant
MQEIKRINKIRRRLVKDSNTKKAGKTGPMKTLLVRVMTPDLRERLENLRKKPENIPQPISNTSRANLNKLLTDYTEMKKAILHVYWEEFQKDPVGLMSRVAQPAPKNIDQRKLIPVKDGNERLTSSGFACSQCCQPLYVYKLEQVNDKGKPHTNYFGRCNVSEHERLILLSPHKPEANDELVTYSLGKFGQRALDFYSIHVTRESNHPVKPLEQIGGNSCASGPVGKALSDACMGAVASFLTKYQDIILEHQKVIKKNEKRLANLKDIASANGLAFPKITLPPQPHTKEGIEAYNNVVAQIVIWVNLNLWQKLKIGRDEAKPLQRLKGFPSFPLVERQANEVDWWDMVCNVKKLINEKKEDGKVFWQNLAGYKRQEALRPYLSSEEDRKKGKKFARYQFGDLLLHLEKKHGEDWGKVYDEAWERIDKKVEGLSKHIKLEEERRSEDAQSKAALTDWLRAKASFVIEGLKEADKDEFKRCELKLQKWYGSLRGKPFAIEAENSILDISGFSKQYNCAFIWQKDGVKKLNLYLIINYFKGGKLRFKKIKPEAFEANRFYTVINKKSGEIVPMEVNFNFDDPNLIILPLAFGKRQGREFIWNDLLSLETGSLKLANGRVIEKTLYNRRTRQDEPALFVALTFERREVLDSSNIKPMNLIGIDRGENIPAVIALTDPEGCPLSRFKDSLGNPTHILRIGESYKEKQRTIQAKKEVEQRRAGGYSRKYASKAKNLADDMVRNTARDLLYYAVTQDAMLIFENLSRGFGRQGKRTFMAERQYTRMEDWLTAKLAYEGLSKTYLSKTLAQYTSKTCSNCGFTITSADYDRVLEKLKKTATGWMTTINGKELKVEGQITYYNRYKRQNVVKDLSVELDRLSEESVNNDISSWTKGRSGEALSLLKKRFSHRPVQEKFVCLNCGFETHADEQAALNIARSWLFLRSQEYKKYQTNKTTGNTDKRAFVETWQSFYRKKLKEVWKPAV

SEQ ID NO: 272 - protein, 977 aa, Artificial Sequence
  CasX variant
MQEIKRINKIRRRLVKDSNTKKAGKTGPMKTLLVRVMTPDLRERLENLRKKPENIPQPISNTSRANLNKLLTDYTEMKKAILHVYWEEFQKDPVGLMSRVAQPAPKNIDQRKLIPVKDGNERLTSSGFACSQCCQPLYVYKLEQVNDKGKPHTNYFGRCNVSEHERLILLSPHKPEANDELVTYSLGKFGQRALDFYSIHVTRESNHPVKPLEQIGGNSCASGPVGKALSDACMGAVASFLTKYQDIILEHQKVIKKNEKRLANLKDIASANGLAFPKITLPPQPHTKEGIEAYNNVVAQIVIWVNLNLWQKLKIGRDEAKPLQRLKGFPSFPLVERQANEVDWWDMVCNVKKLINEKKEDGKVFWQNLAGYKRQEALRPYLSSEEDRKKGKKFARYQFGDLLLHLEKKHGEDWGKVYDEAWERIDKKVEGLSKHIKLEEERRSEDAQSKAALTDWLRAKASFVIEGLKEADKDEFKRCELKLQKWYGDLRGKPFAIEAENSILDISGFSKQYNCAFIWQKDGVKKLNLYLIINYFKGGKLRFKKIKPEAFEANRFYTVINKKSGEIVPMEVNFNFDDPNLIILPLAFGKRQGREFIWNDLLSLETGSLKLANGRVIEKTLYNRRTRQDEPALFVALTFERREVLDSSNIKPMNLIGIDRGENIPAVIALTDPEGCPLSRFKDSLGNPTHILRIGESYKEKQRTIQAKKEVEQRRAGGYSRKYASKAKNLANDMVRNTARDLLYYAVTQDAMLIFENLSRGFGRQGKRTFMAERQYTRMEDWLTAKLAYEGLSKTYLSKTLAQYTSKTCSNCGFTITSADYDRVLEKLKKTATGWMTTINGKELKVEGQITYYNRYKRQNVVKDLSVELDRLSEESVNNDISSWTKGRSGEALSLLKKRFSHRPVQEKFVCLNCGFETHADEQAALNIARSWLFLRSQEYKKYQTNKTTGNTDKRAFVETWQSFYRKKLKEVWKPAV

SEQ ID NO: 273 - protein, 978 aa, Artificial Sequence
  CasX variant
MQEIKRINKIRRRLVKDSNTKKAGKTGPMKTLLVRVMTPDLRERLENLRKKPENIPQPISNTSRANLNKLLTDYTEMKKAILHVYWEEFQKDPVGLMSRVAQPAPKNIDQRKLIPVKDGNERLTSSGFACSQCCQPLYVYKLEQVNDKGKPHTNYFGRCNVSEHERLILLSPHKPEANDELVTYSLGKFGQRALDFYSIHVTRESNHPVKPLEQIGGNSCASGPVGKALSDACMGAVASFLTKYQDIILEHQKVIKKNEKRLANLKDIASANGLAFPKITLPPQPHTKEGIEAYNNVVAQIVIWVNLNLWQKLKIGRDEAKPLQRLKGFPSFPLVERQANEVDWWDMVCNVKKLINEKKEDGKVFWQNLAGYKRQEALLPYLSSEEDRKKGKKFARYQFGDLLLHLEKKHGEDWGKVYDEAWERIDKKVEGLSKHIKLEEERRSEDAQSKAALTDWLRAKASFVIEGLKEADKDEFCRCELKLQKWYGDLRGKPFAIEAENSILDISGFSKQYNCAFIWQKDGVKKLNLYLIINYFKGGKLRFKKIKPEAFEANRFYTVINKKSGEIVPMEVNFNFDDPNLIILPLAFGKRQGREFIWNDLLSLETGSLKLANGRVIEKTLYNRRTRQDEPALFVALTFERREVLDSSNIKPMNLIGIDRGENIPAVIALTDPEGCPLSRFKDSLGNPTHILRIGESYKEKQRTIQAAKEKEQRRAGGYSRKYASKAKNLADDMVRNTARDLLYYAVTQDAMLIFENLSRGFGRQGKRTFMAERQYTRMEDWLTAKLAYEGLPSKTYLSKTLAQYTSKTCSNCGFTITSADYDRVLEKLKKTATGWMTTINGKELKVEGQITYYNRYKRQNVVKDLSVELDRLSEESVNNDISSWTKGRSGEALSLLKKRFSHRPVQEKFVCLNCGFETHADEQAALNIARSWLFLRSQEYKKYQTNKTTGNTDKRAFVETWQSFYRKKLKEVWKPAV

SEQ ID NO: 274 - protein, 977 aa, Artificial Sequence
  CasX variant
MQEIKRINKIRRRLVKDSNTKKAGKTGPMKTLLVRVMTPDLRERLENLRKKPENIPQPISNTSRANLNKLLTDYTEMKKAILHVYWEEFQKDPVGLMSRVAQPAPKNIDQRKLIPVKDGNERLTSSGFACSQCCQPLYVYKLEQVNDKGKPHTNYFGRCNVSEHERLILLSPHKPEANDELVTYSLGKFGQRALDFYSIHVTRESNHPVKPLEQIGGNSCASGPVGKALSDACMGAVASFLTKYQDIILEHQKVIKKNEKRLANLKDIASANGLAFPKITLPPQPHTKEGIEAYNNVVAQIVIWVNLNLWQKLKIGRDEAKPLQRLKGFPSFPLVERQANEVDWWDMVCNVKKLINEKKEDGKVFWQNLAGYKRQEALRPYLSSEEDRKKGKKFARYQFGDLLLHLEKKHGEDWGKVYDEAWERIDKKVEGLSKHIKLEEERRSEDAQSKAALTDWLRAKASFVIEGLKEADKDEFKRCELKLQKWYGDLRGKPFAIEAENSILDISGFSKQYNCAFIWQKDGVKKLNLYLIINYFKGGKLRFKKIKPEAFEANRFYTVINKKSGEIVPMEVNFNFDDPNLIILPLAFGKRQGREFIWNDLLSLETGSLKLANGRVIEKTLYNRRTRQDEPALFVALTFERREVLDSSNIKPMNLIGIDRGENIPAVIALTDPEGCPLSRFKDSLGNPTHILRIGESYKEKQRTIQAKKEVEQRRAGGYSRKYASKAKNLADDMVRNTARDLLYYAVTQDAMLIFENLSRGFGRQGKRTFMAERQYTRMEDWLTAKLAYEGLSKTLLSKTLAQYTSKTCSNCGFTITSADYDRVLEKLKKTATGWMTTINGKELKVEGQITYYNRYKRQNVVKDLSVELDRLSEESVNNDISSWTKGRSGEALSLLKKRFSHRPVQEKFVCLNCGFETHADEQAALNIARSWLFLRSQEYKKYQTNKTTGNTDKRAFVETWQSFYRKKLKEVWKPAV

SEQ ID NO: 275 - protein, 977 aa, Artificial Sequence
  CasX variant
MQEIKRINKIRRRLVKDSNTKKAGKTGPMKTLLVRVMTPDLRERLENLRKKPENIPQPISNTSRANLNKLLTDYTEMKKAILHVYWEEFQKDPVGLMSRVAQPAPKNIDQRKLIPVKDGNERLTSSGFACSQCCQPLYVYKLEQVNDKGKPHTNYFGRCNVSEHERLILLSPHKPEANDELVTYSLGKFGQRALDFYSIHVTRESNHPVKPLEQIGGNSCASGPVGKALSDACMGAVASFLTKYQDIILEHQKVIKKNEKRLANLKDIASANGLAFPKITLPPQPHTKEGIEAYNNVVAQIVIWVNLNLWQKLKIGRDEAKPLQRLKGFPSFPLVERQANEVDWWDMVCNVKKLINEKKEDGKVFWQNLAGYKRQEALRPYLSSEEDRKKGKKFARYQFGDLLLHLEKKHGEDWGKVYDEAWERIDKKVEGLSKHIKLEEERRSEDAQSKAALTDWLRAKASFVIEGLKEADKDEFCRCELKLQKWYGDLRGKPFAIEAENSILDISGFSKQYNCAFIWQKDGVKKLNLYLIINYFKGGKLRFKKIKPEAFEANRFYTVINKKSGEIVPMEVNFNFDDPNLIILPLAFGKRQGREFIWNDLLSLETGSLKLANGRVIEKTLYNRRTRQDEPALFVALTFERREVLDSSNIKPMNLIGIDRGENIPAVIALTDPEGCPLSRFKDSLGNPTHILRIGESYKEKQRTIQAKKEVEQRRAGGYSRKYASKAKNLADDMVRNTARDLLYYAVTQDAMLIFENLSRGFGRQGKRTFMAERQYTRMEDWLTAKLAYEGLSKTYLSKTLAQYTSKTCSNCGFTITSADYDRVLEKLKKTATGWMTTINGKELKVEGQITYYNRYKRQNVVKDLSVELDRLSEESVNNDISSWTKGRSGEALSLLKKRFSHRPVQEKFVCLNCGFETHADEQAALNIARSWLFLRSQEYKKYQTNKTTGNTDKRAFVETWQSFYRKKLKEVWKPAV

SEQ ID NO: 276 - protein, 977 aa, Artificial Sequence
  CasX variant
MQEIKRINKIRRRLVKDSNTKKAGKTGPMKTLLVRVMTPDLRERLENLRKKPENIPQPISNTSRANLNKLLTDYTEMKKAILHVYWEEFQKDPVGLMSRVAQPAPKNIDQRKLIPVKDGNERLTSSGFACSQCCQPLYVYKLEQVNDKGKPHTNYFGRCNVSEHERLILLSPHKPEANDELVTYSLGKFGQRALDFYSIHVTRESNHPVKPLEQIGGNSCASGPVGKALSDACMGAVASFLTKYQDIILEHQKVIKKNEKRLANLKDIASANGLAFPKITLPPQPHTKEGIEAYNNVVAQIVIWVNLNLWQKLKIGRDEAKPLQRLKGFPSFPLVERQANEVDWWDMVCNVKKLINEKKEDGKVFWQNLAGYKRQEALRPYLSSEEDRKKGKKFARYQFGDLLLHLEKKHGEDWGKVYDEAWERIDKKVEGLSKHIKLEEERRSEDAQSKAALTDWLRAKASFVIEGLKEADKDEFKRCELKLQKWYGDLRGKPFAIEAENSILDISGFSKQYNCAFIWQKDGVKKLNLYLIINYFKGGKLRFKKIKPEAFEANRFYTVINKKSGEIVPMEVNFNFDDPNLIILPLAFGKRQGREFIWNDLLSLETGSLKLANGRVIEKTLYNRRTRQDEPALFVALTFERREVLDSSNIKPMNLIGIDRGENIPAVIALTDPEGCPLSRFKDSLGNPTHILRIGESYKEKQRTIQAKKEVEQRRAGGYSRKYASKAKNLADDMVRNTARDLLYYAVTQDAMLIFENLSRGFGRQGKRTFNAERQYTRMEDWLTAKLAYEGLSKTYLSKTLAQYTSKTCSNCGFTITSADYDRVLEKLKKTATGWMTTINGKELKVEGQITYYNRYKRQNVVKDLSVELDRLSEESVNNDISSWTKGRSGEALSLLKKRFSHRPVQEKFVCLNCGFETHADEQAALNIARSWLFLRSQEYKKYQTNKTTGNTDKRAFVETWQSFYRKKLKEVWKPAV

SEQ ID NO: 277 - protein, 977 aa, Artificial Sequence
  CasX variant
MQEIKRINKIRRRLVKDSNTKKAGKTGPMKTLLVRVMTPDLRERLENLRKKPENIPQPISNTSRANLNKLLTDYTEMKKAILHVYWEEFQKDPVGLMSRVAQPAPKNIDQRKLIPVKDGNERLTSSGFACSQCCQPLYVYKLEQVNDKGKPHTNYFGRCNVSEHERLILLSPHKPEANDELVTYSLGKFGQRALDFYSIHVTRESNHPVKPLEQIGGNSCASGPVGKALSDACMGAVASFLTKYQDIILEHQKVIKKNEKRLANLKDIASANGLAFPKITLPPQPHTKEGIEAYNNVVAQIVIWVNLNLWQKLKIGRDEAKPLQRLKGFPSFPLVERQANEVDWWDMVCNVKKLINEKKEDGKVFWQNLAGYKRQEALLPYLSSESDRKKGKKFARYQFGDLLLHLEKKHGEDWGKVYDEAWERIDKKVEGLSKHIKLEEERRSEDAQSKAALTDWLRAKASFVIEGLKEADKDEFCRCELKLQKWYGDLRGKPFAIEAENSILDISGFSKQYNCAFIWQKDGVKKLNLYLIINYFKGGKLRFKKIKPEAFEANRFYTVINKKSGEIVPMEVNFNFDDPNLIILPLAFGKRQGREFIWNDLLSLETGSLKLANGRVIEKTLYNRRTRQDEPALFVALTFERREVLDSSNIKPMNLIGIDRGENIPAVIALTDPEGCPLSRFKDSLGNPTHILRIGESYKEKQRTIQAKKEVEQRRAGGYSRKYASKAKNLADDMVRNTARDLLYYAVTQDAMLIFENLSRGFGRQGKRTFMAERQYTRMEDWLTAKLAYEGLSKTYLSKTLAQYTSKTCSNCGFTITSADYDRVLEKLKKTATGWMTTINGKELKVEGQITYYNRYKRQNVVKDLSVELDRLSEESVNNDISSWTKGRSGEALSLLKKRFSHRPVQEKFVCLNCGFETHADEQAALNIARSWLFLRSQEYKKYQTNKTTGNTDKRAFVETWQSFYRKKLKEVWKPAV

SEQ ID NO: 278 - protein, 977 aa, Artificial Sequence
  CasX variant
MQEIKRINKIRRRLVKDSNTKKAGKTGPMKTLLVRVMTPDLRERLENLRKKPENIPQPISNTSRANLNKLLTDYTEMKKAILHVYWEEFQKDPVGLMSRVAQPAPKNIDQRKLIPVKDGNERLTSSGFACSQCCQPLYVYKLEQVNDKGKPHTNYFGRCNVSEHERLILLSPHKPEANDELVTYSLGKFGQRALDFYSIHVTRESNHPVKPLEQIGGNSCASGPVGKALSDACMGAVASFLTKYQDIILEHQKVIKKNEKRLANLKDIASANGLAFPKITLPPQPHTKEGIEAYNNVVAQIVIWVNLNLWQKLKIGRDEAKPLQRLKGFPSFPLVERQANEVDWWDMVCNVKKLINEKKEDGKVFWQNLAGYKRQEALRPYLSSEEDRKKGKKFARYQFGDLLLHLEKKHGEDWGKVYDEAWERIDKKVEGLSKHIKLEEERRSEDAQSKAALTDWLRAKASFVIEGLKEADKDEFKRCELKLQKWYGDLRGKPFAIEAENSILDISGFSKQYNCAFIWQKDGVKKLNLYLIINYFKGGKLRFKKIKPEAFEANRFYTVINKKSGEIVPMEVNFNFDDPNLIILPLAFGKRQGREFIWNDLLSLETGSLKLANGRVIEKTLYNRRTRQDEPALFVALTFERREVLDSSNIKPMNLIGIDRGENIPAVIALTDPEGCPLSRFKDSLGNPTHILRIGESYKEKQRTIQAKKEVEQRRAGGYSRKYASKAKNLADDMVRNTARDLLYYAVTQDAMLIFENLSRGFGRQGKRTFMAERQYTRMEDWLTAKLAYEGLSKTYLSKTLAQYTSKTCSNCGFTITSADYDRVLEKLKKTATGWMTTINGKELKVEGQITYYNRYKRQNVVKDLSVELDRLSEESVNNDISSWTKGRSGEALSLLKKRFSHRPVQEKFVCLNCGFETHADEQAALNIARSWLFLRSQEYKKYQTNKTTGNTDKRAFVETWQSFYRKKLKEVWKPAV

SEQ ID NO: 279 - protein, 978 aa, Artificial Sequence
  CasX variant
MQEIKRINKIRRRLVKDSNTKKAGKTGPMKTLLVRVMTPDLRERLENLRKKPENIPQPISNTSRANLNKLLTDYTEMKKAILHVYWEEFQKDPVGLMSRVAQPAPKNIDQRKLIPVKDGNERLTSSGFACSQCCQPLYVYKLEQVNDKGKPHTNYFGRCNVSEHERLILLSPHKPEANDELVTYSLGKFGQRALDFYSIHVTRESNHPVKPLEQIGGNSCASGPVGKALSDACMGAVASFLTKYQDIILEHQKVIKKNEKRLANLKDIASANGLAFPKITLPPQPHTKEGIEAYNNVVAQIVIWVNLNLWQKLKIGRDEAKPLQRLKGFPSFPLVERQANEVDWWDMVCNVKKLINEKKEDGKVFWQNLAGYKRQEALLPYLSSEEDRKKGKKFARYQFGDLLLHLEKKHGEDWGKVYDEAWERIDKKVEGLSKHIKLEEERRSEDAQSKAALTDWLRAKASFVIEGLKEADKDEFCRCELKLQKWYGDLRGKPFAIEAENSILDISGFSKQYNCAFIWQKDGVKKLNLYLIINYFKGGKLRFKKIKPEAFEANRFYTVINKKSGEIVPMEVNFNFDDPNLIILPLAFGKRQGREFIWNDLLSLETGSLKLANGRVIEKTLYNRRTRQDEPALFVALTFERREVLDSSNIKPMNLIGIDRGENIPAVIALTDPEGCPLSRFKDSLGNPTHILRIGESYKEKQRTIQAAKEVEQRRAGGYSRKYASKAKNLADDMVRNTARDLLYYAVTQDAMLIFENLSRGFGRQGKRTFMAERQYTRMEDWLTAKLAYEGDPSKTYLSKTLAQYTSKTCSNCGFTITSADYDRVLEKLKKTATGWMTTINGKELKVEGQITYYNRYKRQNVVKDLSVELDRLSEESVNNDISSWTKGRSGEALSLLKKRFSHRPVQEKFVCLNCGFETHADEQAALNIARSWLFLRSQEYKKYQTNKTTGNTDKRAFVETWQSFYRKKLKEVWKPAV

SEQ ID NO: 280 - protein, 978 aa, Artificial Sequence
  CasX variant
MQEIKRINKIRRRLVKDSNTKKAGKTGPMKTLLVRVMTPDLRERLENLRKKPENIPQPISNTSRANLNKLLTDYTEMKKAILHVYWEEFQKDPVGLMSRVAQPAPKNIDQRKLIPVKDGNERLTSSGFACSQCCQPLYVYKLEQVNDKGKPHTNYFGRCNVSEHERLILLSPHKPEANDELVTYSLGKFGQRALDFYSIHVTRESNHPVKPLEQIGGNSCASGPVGKALSDACMGAVASFLTKYQDIILEHQKVIKKNEKRLANLKDIASANGLAFPKITLPPQPHTKEGIEAYNNVVAQIVIWVNLNLWQKLKIGRDEAKPLQRLKGFPSFPLVERQANEVDWWDMVCNVKKLINEKKEDGKVFWQNLAGYKRQEALLPYLSSEEDRKKGKKFARYQFGDLLLHLEKKHGEDWGKVYDEAWERIDKKVEGLSKHIKLEEERRSEDAQSKAALTDWLRAKASFVIEGLKEADKDEFCRCELKLQKWYGDLRGKPFAIEAENSILDISGFSKQYNCAFIWQKDGVKKLNLYLIINYFKGGKLRFKKIKPEAFEANRFYTVINKKSGEIVPMEVNFNFDDPNLIILPLAFGKRQGREFIWNDLLSLETGSLKLANGRVIEKTLYNRRTRQDEPALFVALTFERREVLDSSNIKPMNLIGIDRGENIPAVIALTDPEGCPLSRFKDSLGNPTHILRIGESYKEKQRTIQAAKEVEQRRAGGYSRKYASKAKNLADDMVRNTARDLLYYAVTQDAMLIFENLSRGFGRQGKRTFMAERQYTRMEDWLTAKLAYEFLPSKTYLSKTLAQYTSKTCSNCGFTITSADYDRVLEKLKKTATGWMTTINGKELKVEGQITYYNRYKRQNVVKDLSVELDRLSEESVNNDISSWTKGRSGEALSLLKKRFSHRPVQEKFVCLNCGFETHADEQAALNIARSWLFLRSQEYKKYQTNKTTGNTDKRAFVETWQSFYRKKLKEVWKPAV

SEQ ID NO: 281 - protein, 977 aa, Artificial Sequence
  CasX variant
MQEIKRINKIRRRLVKDSNTKKAGKTGPMKTLLVRVMTPDLRERLENLRKKPENIPQPISNTSRANLNKLLTDYTEMKKAILHVYWEEFQKDPVGLMSRVAQPAPKNIDQRKLIPVKDGNERLTSSGFACSQCCQPLYVYKLEQVNDKGKPHTNYFGRCNVSEHERLILLSPHKPEANDELVTYSLGKFGQRALDFYSIHVTRESNHPVKPLEQIGGNSCASGPVGKALSDACMGAVASFLTKYQDIILEHQKVIKKNEKRLANLKDIASANGLAFPKITLPPQPHTKEGIEAYNNVVAQIVIWVNLNLWQKLKIGRDEAKPLQRLKGFPSFPLVERQANEVDWWDMVCNVKKLINEKKEDGKVFWQNLAGYKRQEALLPYLSSEEDRKKGKKFARYQFGDLLLHLEKKHGEDWGKVYDEAWERIDKKVEGLSKHIKLEEERRSEDAQSKAALTDWLRAKASFVIEGLKEADKDEFCRCELKLQKWYGDLRGKPFAIEAENSILDISGFSKQYNCAFIWQKDGVKKLNLYLIINYFKGGKLRFKKIKPEAFEANRFYTVINKKSGEIVPMEVNFNFDDPNLIILPLAFGKRQGREFIWNDLLSLETGSLKLANGRVIEKTLYNRRTRQDEPALFVALTFERREVLDSSNIKPMNLIGIDRGENIPAVIALTDPEGCPLSRFKDSLGNPTHILRIGESYKEKQRTIQAKKEVEQRRAGGYSRKYASKAKNLADDMVRNTVRDLLYYAVTQDAMLIFENLSRGFGRQGKRTFMAERQYTRMEDWLTAKLAYEGLSKTYLSKTLAQYTSKTCSNCGFTITSADYDRVLEKLKKTATGWMTTINGKELKVEGQITYYNRYKRQNVVKDLSVELDRLSEESVNNDISSWTKGRSGEALSLLKKRFSHRPVQEKFVCLNCGFETHADEQAALNIARSWLFLRSQEYKKYQTNKTTGNTDKRAFVETWQSFYRKKLKEVWKPAV

SEQ ID NO: 282 - protein, 977 aa, Artificial Sequence
  CasX variant
MQEIKRINKIRRRLVKDSNTKKAGKTGPMKTLLVRVMTPDLRERLENLRKKPENIPQPISNTSRANLNKLLTDYTEMKKAILHVYWEEFQKDPVGLMSRVAQPAPKNIDQRKLIPVKDGNERLTSSGFACSQCCQPLYVYKLEQVNDKGKPHTNYFGRCNVSEHERLILLSPHKPEANDELVTYSLGKFGQRALDFYSIHVTRESNHPVKPLEQIGGNSCASGPVGKALSDACMGAVASFLTKYQDIILEHQKVIKKNEKRLANLKDIASANGLAFPKITLPPQPHTKEGIEAYNNVVAQIVIWVNLNLWQKLKIGRDEAKPLQRLKGFPSFPLVERQANEVDWWDMVCNVKKLINEKKEDGKVFWQNLAGYKRQEALRPYLSSEEDRKKGKKFARYQFGDLLLHLEKKHGEDWGKVYDEAWERIDKKVEGLSKHIKLEEERRSEDAQSKAALTDWLRAKASFVIEGLKEADKDEFCRCELKLQKWYGDLRGKPFAIEAENSILDISGFSKQYNCAFIWQKDGVKKLNLYLIINYFKGGKLRFKKIKPEAFEANRFYTVINKKSGEIVPMEVNFNFDDPNLIILPLAFGKRQGREFIWNDLLSLETGSLKLANGRVIEKTLYNRRTRQDEPALFVALTFERREVLDSSNIKPMNLIGIDRGENIPAVIALTDPEGCPLSRFKDSLGNPTHILRIGESYKEKQRTIQAKKEVEQRRAGGYSRKYASKAKNLADDMVRNTVRDLLYYAVTQDAMLIFENLSRGFGRQGKRTFMAERQYTRMEDWLTAKLAYEGLSKTYLSKTLAQYTSKTCSNCGFTITSADYDRVLEKLKKTATGWMTTINGKELKVEGQITYYNRYKRQNVVKDLSVELDRLSEESVNNDISSWTKGRSGEALSLLKKRFSHRPVQEKFVCLNCGFETHADEQAALNIARSWLFLRSQEYKKYQTNKTTGNTDKRAFVETWQSFYRKKLKEVWKPAV

SEQ ID NO: 283 - protein, 977 aa, Artificial Sequence
  CasX variant
MQEIKRINKIRRRLVKDSNTKKAGKTGPMKTLLVRVMTPDLRERLENLRKKPENIPQPISNTSRANLNKLLTDYTEMKKAILHVYWEEFQKDPVGLMSRVAQPAPKNIDQRKLIPVKDGNERLTSSGFACSQCCQPLYVYKLEQVNDKGKPHTNYFGRCNVSEHERLILLSPHKPEANDELVTYSLGKFGQRALDFYSIHVTRESNHPVKPLEQIGGNSCASGPVGKALSDACMGAVASFLTKYQDIILEHQKVIKKNEKRLANLKDIASANGLAFPKITLPPQPHTKEGIEAYNNVVAQIVIWVNLNLWQKLKIGRDEAKPLQRLKGFPSFPLVERQANEVDWWDMVCNVKKLINEKKEDGKVFWQNLAGYKRQEALLPYLSSEEDRKKGKKFARYQFGDLLLHLEKKHGEDWGKVYDEAWERIDKKVEGLSKHIKLEEERRSEDAQSKAALTDWLRAKASFVIEGLKEADKDEFKRCELKLQKWYGDLRGKPFAIEAENSILDISGFSKQYNCAFIWQKDGVKKLNLYLIINYFKGGKLRFKKIKPEAFEANRFYTVINKKSGEIVPMEVNFNFDDPNLIILPLAFGKRQGREFIWNDLLSLETGSLKLANGRVIEKTLYNRRTRQDEPALFVALTFERREVLDSSNIKPMNLIGIDRGENIPAVIALTDPEGCPLSRFKDSLGNPTHILRIGESYKEKQRTIQAKKEVEQRRAGGYSRKYASKAKNLADDMVRNTARDLLYYAVTQDAMLIFENLSRGFGRQGKRTFMAERQYTRMEDWLTAKLAYEGLSKTYLSKTLAQYTSKTCSNCGFTITSADYDRVLEKLKKTATGWMTTINGKELKVEGQITYYNRYKRQNVVKDLSVELDRLSEESVNNDISSWTKGRSGEALSLLKKRFSHRPVQEKFVCLNCGFETHADEQAALNIARSWLFLRSQEYKKYQTNKTTGNTDKRAFVETWQSFYRKKLKEVWKPAV

SEQ ID NO: 284 - protein, 978 aa, Artificial Sequence
  CasX variant
MQEIKRINKIRRRLVKDSNTKKAGKTGPMKTLLVRVMTPDLRERLENLRKKPENIPQPISNTSRANLNKLLTDYTEMKKAILHVYWEEFQKDPVGLMSRVAQPAPKNIDQRKLIPVKDGNERLTSSGFACSQCCQPLYVYKLEQVNDKGKPHTNYFGRCNVSEHERLILLSPHKPEANDELVTYSLGKFGQRALDFYSIHVTRESNHPVKPLEQIGGNSCASGPVGKALSDACMGAVASFLTKYQDIIIEHQKVIKKNEKRLANLKDIASANGLAFPKITLPPQPHTKEGIEAYNNVVAQIVIWVNLNLWQKLKIGRDEAKPLQRLKGFPSFPLVERQANEVDWWDMVCNVKKLINEKKEDGKVFWQNLAGYKRQEALLPYLSSEEDRKKGKKFARYQFGDLLLHLEKKHGEDWGKVYDEAWERIDKKVEGLSKHIKLEEERRSEDAQSKAALTDWLRAKASFVIEGLKEADKDEFCRCELKLQKWYGDLRGKPFAIEAENSILDISGFSKQYNCAFIWQKDGVKKLNLYLIINYFKGGKLRFKKIKPEAFEANRFYTVINKKSGEIVPMEVNFNFDDPNLIILPLAFGKRQGREFIWNDLLSLETGSLKLANGRVIEKTLYNRRTRQDEPALFVALTFERREVLDSSNIKPMNLIGIDRGENIPAVIALTDPEGCPLSRFKDSLGNPTHILRIGESYKEKQRTIQAAKEVEQRRAGGYSRKYASKAKNLADDMVRNTARDLLYYAVTQDAMLIFENLSRGFGRQGKRTFNAERQYTRMEDWLTAKLAYEGLPSKTYLSKTLAQYTSKTCSNCGFTITSADYDRVLEKLKKTATGWMTTINGKELKVEGQITYYNRYKRQNVVKDLSVELDRLSEESVNNDISSWTKGRSGEALSLLKKRFSHRPVQEKFVCLNCGFETHADEQAALNIARSWLFLRSQEYKKYQTNKTTGNTDKRAFVETWQSFYRKKLKEVWKPAV

SEQ ID NO: 285 - protein, 978 aa, Artificial Sequence
  CasX variant
MQEIKRINKIRRRLVKDSNTKKAGKTGPMKTLLVRVMTPDLRERLENLRKKPENIPQPISNTSRANLNKLLTDYTEMKKAILHVYWEEFQKDPVGLMSRVAQPAPKNIDQRKLIPVKDGNERLTSSGFACSQCCQPLYVYKLEQVNDKGKPHTNYFGRCNVSEHERLILLSPHKPEANDELVTYSLGKFGQRALDFYSIHVTRESNHPVKPLEQIGGNSCASGPVGKALSDACMGAVASFLTKYQDIILEHQKVIKKNEKRLANLKDIASANGLAFPKITLPPQPHTKEGIEAYNNVVAQIVIWVNLNLWQKLKIGRDEAKPLQRLKGFPSFPLVERQANEVDWWDMVCNVKKLINEKKEDGKVFWQNLAGYKRQEALLPYLSSEEDRKKGKKFARYQFGDLLLHLEKKHGEDWGKVYDEAWERIDKKVEGLSKHIKLEEERRSEDAQSKAALTDWLRAKASFVIEGLKEADKDEFCRCELKLQKWYGDLRGKPFAIEAENSILDISGFSKQYNCAFIWQKDGVKKLNLYLIINYFKGGKLRFKKIKPEAFEANRFYTVINKKSGEIVPMEVNFNFDDPNLIILPLAFGKRQGREFIWNDLLSLETGSLKLANGRVIEKTLYNRRTRQDEPALFVALTFERREVLDSSNIKPMNLIGIDRGENIPAVIALTDPEGCPLSRFKDSLGNPTHILRIGESYKEKQRTIQAAKEVEQRRAGGYSRKYASKAKNLADDMVRNTARDLLYYAKTQDAMLIFENLSRGFGRQGKRTFMAERQYTRMEDWLTAKLAYEGLPSKTYLSKTLAQYTSKTCSNCGFTITSADYDRVLEKLKKTATGWMTTINGKELKVEGQITYYNRYKRQNVVKDLSVELDRLSEESVNNDISSWTKGRSGEALSLLKKRFSHRPVQEKFVCLNCGFETHADEQAALNIARSWLFLRSQEYKKYQTNKTTGNTDKRAFVETWQSFYRKKLKEVWKPAV

SEQ ID NO: 286 - protein, 977 aa, Artificial Sequence
  CasX variant
MQEIKRINKIRRRLVKDSNTKKAGKTGPMKTLLVRVMTPDLRERLENLRKKPENIPQPISNTSRANLNKLLTDYTEMKKAILHVYWEEFQKDPVGLMSRVAQPAPKNIDQRKLIPVKDGNERLTSSGFACSQCCQPLYVYKLEQVNDKGKPHTNYFGRCNVSEHERLILLSPHKPEANDELVTYSLGKFGQRALDFYSIHVTRESNHPVKPLEQIGGNSCASGPVGKALSDACMGAVASFLTKYQDIILEHQKVIKKNEKRLANLKDIASANGLAFPKITLPPQPHTKEGIEAYNNVVAQIVIWVNLNLWQKLKIGRDEAKPLQRLKGFPSFPLVERQANEVDWWDMVCNVKKLINEKKEDGKVFWQNLAGYKRQEALRPYLSSEEDRKKGKKFARYQFGDLLLHLEKKHGEDWGKVYDEAWERIDKKVEGLSKHIKLEEERRSEDAQSKAALTDWLRAKASFVIEGLKEADKDEFKRCELKLQKWYGDLRGKPFAIEAENSILDISGFSKQYNCAFIWQKDGVKKLNLYLIINYFKGGKLRFKKIKPEAFEANRFYTVINKKSGEIVPMEVNFNFDDPNLIILPLAFGKRQGREFIWNDLLSLETGSLKLANGRVIEKTLYNRRTRQDEPALFVALTFERREVLDSSNIKPMNLIGIDRGENIPAVIALTDPEGCPLSRFKDSLGNPTHILRIGESYKEKQRTIQAKKEVEQRRAGGYSRKYASKAKNLADDMVRNTARDLLYYAVTQDAMLIFENLSRGFGRQGKRTFMAERQYTRNEDWLTAKLAYEGLSKTYLSKTLAQYTSKTCSNCGFTITSADYDRVLEKLKKTATGWMTTINGKELKVEGQITYYNRYKRQNVVKDLSVELDRLSEESVNNDISSWTKGRSGEALSLLKKRFSHRPVQEKFVCLNCGFETHADEQAALNIARSWLFLRSQEYKKYQTNKTTGNTDKRAFVETWQSFYRKKLKEVWKPAV

SEQ ID NO: 287 - protein, 978 aa, Artificial Sequence
  CasX variant
MQEIKRINKIRRRLVKDSNTKKAGKTGPMKTLLVRVMTPDLRERLENLRKKPENIPQPISNTSRANLNKLLTDYTEMKKAILHVYWEEFQKDPVGLMSRVAQPAPKNIDQRKLIPVKDGNERLTSSGFACSQCCQPLYVYKLEQVNDKGKPHTNYFGRCNVSEHERLILLSPHKPEANDELVTYSLGKFGQRALDFYSIHVTRESNHPVKPLEQIGGNSCASGPVGKALSDACMGAVASFLTKYQDIILEHQKVIKKNEKRLANLKDIASANGLAFPKITLPPQPHTKEGIEAYNNVVAQIVIWVNLNLWQKLKIGRDEAKPLQRLKGFPSFPLVERQANEVDWWDMVCNVKKLINEKKEDGKVFWQNLAGYKRQEALLPYLSSEEDRKKGKKFARYQFGDLLLHLEKKHGEDWGKVYDEAWERIDKKVEGLSKHIKLEEERRSEDAQSKAALTDWLRAKASFVIEGLKEADKDEFCRCELKLQKWYGDLRGKPFAIEAENSILDISGFSKQYNCAFIWQKDGVKKLNLYLIINYFKGGKLRFKKIKPEAFEANRFYTVINKKSGEIVPMEVNFNFDDPNLIILPLAFGKRQGREFIWNDLLSLETGSLKLANGRVIEKTLYNRRTRQDEPALFVALTFERREVLDSSNIKPMNLIGIDRGENIPAVIALTDPEGCPLSRFKDSLGNPTHILRIGESYKEKQRTIQAAKEVEQRRAGGYSRKYASKAKNLADDMVRNTARDLLYYAVTQDAMLIMENLSRGFGRQGKRTFMAERQYTRMEDWLTAKLAYEGLPSKTYLSKTLAQYTSKTCSNCGFTITSADYDRVLEKLKKTATGWMTTINGKELKVEGQITYYNRYKRQNVVKDLSVELDRLSEESVNNDISSWTKGRSGEALSLLKKRFSHRPVQEKFVCLNCGFETHADEQAALNIARSWLFLRSQEYKKYQTNKTTGNTDKRAFVETWQSFYRKKLKEVWKPAV

SEQ ID NO: 288 - protein, 977 aa, Artificial Sequence
  CasX variant
MQEIKRINKIRRRLVKDSNTKKAGKTGPMKTLLVRVMTPDLRERLENLRKKPENIPQPISNTSRANLNKLLTDYTEMKKAILHVYWEEFQKDPVGLMSRVAQPAPKNIDQRKLIPVKDGNERLTSSGFACSQCCQPLYVYKLEQVNDKGKPHTNYFGRCNVSEHERLILLSPHKPEANDELVTYSLGKFGQRALDFYSIHVTRESNHPVKPLEQIGGNSCASGPVGKALSDACMGAVASFLTKYQDIILEHQKVIKKNEKRLANLKDIASANGLAFPKITLPPQPHTKEGIEAYNNVVAQIVIWVNLNLWQKLKIGRDEAKPLQRLKGFPSFPLVERQANEVDWWDMVCNVKKLINEKKEDGKVFWQNLAGYKRQEALRPYLSSEEDRKKGKKFARYQFGDLLLHLEKKHGEDWGKVYDEAWERIDKKVEGLSKHIKLEEERRSEDAQSKAALTDWLRAKASFVIEGLKEADKDEFCRCELKLQKWYGDLRGKPFAIEAENSILDISGFSKQYNCAFIWQKDGVKKLNLYLIINYFKGGKLRFKKIKPEAFEANRFYTVINKKSGEIVPMEVNFNFDDPNLIILPLAFGKRQGREFIWNDLLSLETGSLKLANGRVIEKTLYNRRTRQDEPALFVALTFERREVLDSSNIKPMNLIGIDRGENIPAVIALTDPEGCPLSRFKDSLGNPTHILRIGESYKEKQRTIQAKKEVEQRRAGGYSRKYASKAKNLADDMVRNTARDLLYYAVTQDAMLIFENLSRGFGRQGKRTFMAERQYTRMEDWLTAKLAYEGLSKTYLSKTLAQYTSKTCSNCGFTITSADYDRVLEKLKKTATGWMTTINGKELKVEGQITYYNRRKRQNVVKDLSVELDRLSEESVNNDISSWTKGRSGEALSLLKKRFSHRPVQEKFVCLNCGFETHADEQAALNIARSWLFLRSQEYKKYQTNKTTGNTDKRAFVETWQSFYRKKLKEVWKPAV

SEQ ID NO: 289 - protein, 977 aa, Artificial Sequence
  CasX variant
MQEIKRINKIRRRLVKDSNTKKAGKTGPMKTLLVRVMTPDLRERLENLRKKPENIPQPISNTSRANLNKLLTDYTEMKKAILHVYWEEFQKDPVGLMSRVAQPAPKNIDQRKLIPVKDGNERLTSSGFACSQCCQPLYVYKLEQVNDKGKPHTNYFGRCNVSEHERLILLSPHKPEANDELVTYSLGKFGQRALDFYSIHVTRESNHPVKPLEQIGGNSCASGPVGKALSDACMGAVASFLTKYQDIILEHQKVIKKNEKRLANLKDIASANGLAFPKITLPPQPHTKEGIEAYNNVVAQIVIWVNLNLWQKLKIGRDEAKPLQRLKGFPSFPLVERQANEVDWWDMVCNVKKLINEKKEDGKVFWQNLAGYKRQEALRPYLSSEEDRKKGKKFARYQFGDLLLHLEKKHGEDWGKVYDEAWERIDKKVEGLSKHIKLEEERRSEDAQSKAALTDWLRAKASFVIEGLKEADKDEFCRCELKLQKWYGDLRGKPFAIEAENSILDISGFSKQYNCAFIWQKDGVKKLNLYLIINYFKGGKLRFKKIKPEAFEANRFYTVINKKSGEIVPMEVNFNFDDPNLIILPLAFGKRQGREFIWNDLLSLETGSLKLANGRVIEKTLYNRRTRQDEPALFVALTFERREVLDSSNIKPMNLIGVDRGENIPAVIALTDPEGCPLSRFKDSLGNPTHILRIGESYKEKQRTIQAKKEVEQRRAGGYSRKYASKAKNLADDMVRNTARDLLYYAVTQDAMLIFENLSRGFGRQGKRTFMAERQYTRMEDWLTAKLAYEGLSKTYLSKTLAQYTSKTCSNCGFTITSADYDRVLEKLKKTATGWMTTINGKELKVEGQITYYNRRKRQNVVKDLSVELDRLSEESVNNDISSWTKGRSGEALSLLKKRFSHRPVQEKFVCLNCGFETHADEQAALNIARSWLFLRSQEYKKYQTNKTTGNTDKRAFVETWQSFYRKKLKEVWKPAV

SEQ ID NO: 290 - protein, 977 aa, Artificial Sequence
  CasX variant
MQEIKRINKIRRRLVKDSNTKKAGKTGPMKTLLVRVMTPDLRERLENLRKKPENIPQPISNTSRANLNKLLTDYTEMKKAILHVYWEEFQKDPVGLMSRVAQPAPKNIDQRKLIPVKDGNERLTSSGFACSQCCQPLYVYKLEQVNDKGKPHTNYFGRCNVSEHERLILLSPHKPEANDELVTYSLGKFGQRALDFYSIHVTRESNHPVKPLEQIGGNSCASGPVGKALSDACMGAVASFLTKYQDIILEHQKVIKKNEKRLANLKDIASANGLAFPKITLPPQPHTKEGIEAYNNVVAQIVIWVNLNLWQKLKIGRDEAKPLQRLKGFPSFPLVERQANEVDWWDMVCNVKKLINEKKEDGKVFWQNLAGYKRQEALRPYLSSENDRKKGKKFARYQFGDLLLHLEKKHGEDWGKVYDEAWERIDKKVEGLSKHIKLEEERRSEDAQSKAALTDWLRAKASFVIEGLKEADKDEFCRCELKLQKWYGDLRGKPFAIEAENSILDISGFSKQYNCAFIWQKDGVKKLNLYLIINYFKGGKLRFKKIKPEAFEANRFYTVINKKSGEIVPMEVNFNFDDPNLIILPLAFGKRQGREFIWNDLLSLETGSLKLANGRVIEKTLYNRRTRQDEPALFVALTFERREVLDSSNIKPMNLIGVDRGENIPAVIALTDPEGCPLSRFKDSLGNPTHILRIGESYKEKQRTIQAKKEVEQRRAGGYSRKYASKAKNLADDMVRNTARDLLYYAVTQDAMLIFENLSRGFGRQGKRTFMAERQYTRMEDWLTAKLAYEGLSKTYLSKTLAQYTSKTCSNCGFTITSADYDRVLEKLKKTATGWMTTINGKELKVEGQITYYNRRKRQNVVKDLSVELDRLSEESVNNDISSWTKGRSGEALSLLKKRFSHRPVQEKFVCLNCGFETHADEQAALNIARSWLFLRSQEYKKYQTNKTTGNTDKRAFVETWQSFYRKKLKEVWKPAV

SEQ ID NO: 291 - protein, 977 aa, Artificial Sequence
  CasX variant
MQEIKRINKIRRRLVKDSNTKKAGKTGPMKTLLVRVMTPDLRERLENLRKKPENIPQPISNTSRANLNKLLTDYTEMKKAILHVYWEEFQKDPVGLMSRVAQPAPKNIDQRKLIPVKDGNERLTSSGFACSQCCQPLYVYKLEQVNDKGKPHTNYFGRCNVSEHERLILLSPHKPEANDELVTYSLGKFGQRALDFYSIHVTRESNHPVKPLEQIGGNSCASGPVGKALSDACMGAVASFLTKYQDIILEHQKVIKKNEKRLANLKDIASANGLAFPKITLPPQPHTKEGIEAYNNVVAQIVIWVNLNLWQKLKIGRDEAKPLQRLKGFPSFPLVERQANEVDWWDMVCNVKKLINEKKEDGKVFWQNLAGYKRQEALRPYLSSEEDRKKGKKFARYQFGDLLKHLEKKHGEDWGKVYDEAWERIDKKVEGLSKHIKLEEERRSEDAQSKAALTDWLRAKASFVIEGLKEADKDEFCRCELKLQKWYGDLRGKPFAIEAENSILDISGFSKQYNCAFIWQKDGVKKLNLYLIINYFKGGKLRFKKIKPEAFEANRFYTVINKKSGEIVPMEVNFNFDDPNLIILPLAFGKRQGREFIWNDLLSLETGSLKLANGRVIEKTLYNRRTRQDEPALFVALTFERREVLDSSNIKPMNLIGVDRGENIPAVIALTDPEGCPLSRFKDSLGNPTHILRIGESYKEKQRTIQAKKEVEQRRAGGYSRKYASKAKNLADDMVRNTARDLLYYAVTQDAMLIFENLSRGFGRQGKRTFMAERQYTRMEDWLTAKLAYEGLSKTYLSKTLAQYTSKTCSNCGFTITSADYDRVLEKLKKTATGWMTTINGKELKVEGQITYYNRRKRQNVVKDLSVELDRLSEESVNNDISSWTKGRSGEALSLLKKRFSHRPVQEKFVCLNCGFETHADEQAALNIARSWLFLRSQEYKKYQTNKTTGNTDKRAFVETWQSFYRKKLKEVWKPAV

SEQ ID NO: 292 - protein, 978 aa, Artificial Sequence
  CasX variant
MQEIKRINKIRRRLVKDSNTKKAGKTGPMKTLLVRVMTPDLRERLENLRKKPENIPQPISNTSRANLNKLLTDYTEMKKAILHVYWEEFQKDPVGLMSRVAQPAPKNIDQRKLIPVKDGNERLTSSGFACSQCCQPLYVYKLEQVNDKGKPHTNYFGRCNVSEHERLILLSPHKPEANDELVTYSLGKFGQVRALDFYSIHVTRESNHPVKPLEQIGGNSCASGPVGKALSDACMGAVASFLTKYQDIILEHQKVIKKNEKRLANLKDIASANGLAFPKITLPPQPHTKEGIEAYNNVVAQIVIWVNLNLWQKLKIGRDEAKPLQRLKGFPSFPLVERQANEVDWWDMVCNVKKLINEKKEDGKVFWQNLAGYKRQEALRPYLSSEEDRKKGKKFARYQFGDLLLHLEKKHGEDWGKVYDEAWERIDKKVEGLSKHIKLEEERRSEDAQSKAALTDWLRAKASFVIEGLKEADKDEFCRCELKLQKWYGDLRGKPFAIEAENSILDISGFSKQYNCAFIWQKDGVKKLNLYLIINYFKGGKLRFKKIKPEAFEANRFYTVINKKSGEIVPMEVNFNFDDPNLIILPLAFGKRQGREFIWNDLLSLETGSLKLANGRVIEKTLYNRRTRQDEPALFVALTFERREVLDSSNIKPMNLIGVDRGENIPAVIALTDPEGCPLSRFKDSLGNPTHILRIGESYKEKQRTIQAKKEVEQRRAGGYSRKYASKAKNLADDMVRNTARDLLYYAVTQDAMLIFENLSRGFGRQGKRTFMAERQYTRMEDWLTAKLAYEGLSKTYLSKTLAQYTSKTCSNCGFTITSADYDRVLEKLKKTATGWMTTINGKELKVEGQITYYNRRKRQNVVKDLSVELDRLSEESVNNDISSWTKGRSGEALSLLKKRFSHRPVQEKFVCLNCGFETHADEQAALNIARSWLFLRSQEYKKYQTNKTTGNTDKRAFVETWQSFYRKKLKEVWKPAV

SEQ ID NO: 293 - protein, 977 aa, Artificial Sequence
  CasX variant
MQEIKRINKIRRRLVKDSNTKKAGKTGPMKTLLVRVMTPDLRERLENLRKKPENIPQPISNTSRANLNKLLTDYTEMKKAILHVYWEEFQKDPVGLMSRVAQPAPKNIDQRKLIPVKDGNERLTSSGFACSQCCQPLYVYKLEQVNDKGKPHTNYFGRCNVSEHERLILLSPHKPEANDELVTYSLGKFGQRALDFYSIHVTRESNHPVKPLEQIGGNSCASGPVGKALSDACMGAVASFLTKYQDIILEHQKVIKKNEKRLANLKDIASANGLAFPKITLPPQPHTKEGIEAYNNVVAQIVIWVNLNLWQKLKIGRDEAKPLQRLKGFPSFPLVERQANEVDWWDMVCNVKKLINEKKEDGKVFWQNLAGYKRQEALRPYLSSENDRKKGKKFARYQFGDLLKHLEKKHGEDWGKVYDEAWERIDKKVEGLSKHIKLEEERRSEDAQSKAALTDWLRAKASFVIEGLKEADKDEFCRCELKLQKWYGDLRGKPFAIEAENSILDISGFSKQYNCAFIWQKDGVKKLNLYLIINYFKGGKLRFKKIKPEAFEANRFYTVINKKSGEIVPMEVNFNFDDPNLIILPLAFGKRQGREFIWNDLLSLETGSLKLANGRVIEKTLYNRRTRQDEPALFVALTFERREVLDSSNIKPMNLIGVDRGENIPAVIALTDPEGCPLSRFKDSLGNPTHILRIGESYKEKQRTIQAKKEVEQRRAGGYSRKYASKAKNLADDMVRNTARDLLYYAVTQDAMLIFENLSRGFGRQGKRTFMAERQYTRMEDWLTAKLAYEGLSKTYLSKTLAQYTSKTCSNCGFTITSADYDRVLEKLKKTATGWMTTINGKELKVEGQITYYNRRKRQNVVKDLSVELDRLSEESVNNDISSWTKGRSGEALSLLKKRFSHRPVQEKFVCLNCGFETHADEQAALNIARSWLFLRSQEYKKYQTNKTTGNTDKRAFVETWQSFYRKKLKEVWKPAV

SEQ ID NO: 294 - protein, 977 aa, Artificial Sequence
  CasX variant
MQEIKRINKIRRRLVKDSNTKKAGKTGPMKTLLVRVMTPDLRERLENLRKKPENIPQPISNTSRANLNKLLTDYTEMKKAILHVYWEEFQKDPVGLMSRVAQPAPKNIDQRKLIPVKDGNERLTSSGFACSQCCQPLYVYKLEQVNDKGKPHTNYFGRCNVSEHERLILLSPHKPEANDELVTYSLGKFGQRALDFYSIHVTRESNHPVKPLEQIGGNSCASGPVGKALSDACMGAVASFLTKYQDIILEHQKVIKKNEKRLANLKDIASANGLAFPKITLPPQPHTKEGIEAYNNVVAQIVIWVNLNLWQKLKIGRDEAKPLQRLKGFPSFPLVERQANEVDWWDMVCNVKKLINEKKEDGKVFWQNLAGYKRQEALRPYLSSEEDRKKGKKFARYQLGDLLLHLEKKHGEDWGKVYDEAWERIDKKVEGLSKHIKLEEERRSEDAQSKAALTDWLRAKASFVIEGLKEADKDEFCRCELKLQKWYGDLRGKPFAIEAENSILDISGFSKQYNCAFIWQKDGVKKLNLYLIINYFKGGKLRFKKIKPEAFEANRFYTVINKKSGEIVPMEVNFNFDDPNLIILPLAFGKRQGREFIWNDLLSLETGSLKLANGRVIEKTLYNRRTRQDEPALFVALTFERREVLDSSNIKPMNLIGVDRGENIPAVIALTDPEGCPLSRFKDSLGNPTHILRIGESYKEKQRTIQAKKEVEQRRAGGYSRKYASKAKNLADDMVRNTARDLLYYAVTQDAMLIFENLSRGFGRQGKRTFMAERQYTRMEDWLTAKLAYEGLSKTYLSKTLAQYTSKTCSNCGFTITSADYDRVLEKLKKTATGWMTTINGKELKVEGQITYYNRRKRQNVVKDLSVELDRLSEESVNNDISSWTKGRSGEALSLLKKRFSHRPVQEKFVCLNCGFETHADEQAALNIARSWLFLRSQEYKKYQTNKTTGNTDKRAFVETWQSFYRKKLKEVWKPAV

SEQ ID NO: 295 - protein, 977 aa, Artificial Sequence
  CasX variant
MQEIKRINKIRRRLVKDSNTKKAGKTGPMKTLLVRVMTPDLRERLENLRKKPENIPQPISNTSRANLNKLLTDYTEMKKAILHVYWEEFQKDPVGLMSRVAQPAPKNIDQRKLIPVKDGNERLTSSGFACSQCCQPLYVYKLEQVNDKGKPHTNYFGRCNVSEHERLILLSPHKPEANDELVTYSLGKFGQRALDFYSIHVTRESNHPVKPLEQIGGNSCASGPVGKALSDACMGAVASFLTKYQDIILEHQKVIKKNEKRLANLKDIASANGLAFPKITLPPQPHTKEGIEAYNNVVAQIVIWVNLNLWQKLKIGRDEAKPLQRLKGFPSFPLVERQANEVDWWDMVCNVKKLINEKKEDGKVFWQNLAGYKRQEALRPYLSSENDRKKGKKFARYQLGDLLLHLEKKHGEDWGKVYDEAWERIDKKVEGLSKHIKLEEERRSEDAQSKAALTDWLRAKASFVIEGLKEADKDEFCRCELKLQKWYGDLRGKPFAIEAENSILDISGFSKQYNCAFIWQKDGVKKLNLYLIINYFKGGKLRFKKIKPEAFEANRFYTVINKKSGEIVPMEVNFNFDDPNLIILPLAFGKRQGREFIWNDLLSLETGSLKLANGRVIEKTLYNRRTRQDEPALFVALTFERREVLDSSNIKPMNLIGVDRGENIPAVIALTDPEGCPLSRFKDSLGNPTHILRIGESYKEKQRTIQAKKEVEQRRAGGYSRKYASKAKNLADDMVRNTARDLLYYAVTQDAMLIFENLSRGFGRQGKRTFMAERQYTRMEDWLTAKLAYEGLSKTYLSKTLAQYTSKTCSNCGFTITSADYDRVLEKLKKTATGWMTTINGKELKVEGQITYYNRRKRQNVVKDLSVELDRLSEESVNNDISSWTKGRSGEALSLLKKRFSHRPVQEKFVCLNCGFETHADEQAALNIARSWLFLRSQEYKKYQTNKTTGNTDKRAFVETWQSFYRKKLKEVWKPAV

SEQ ID NO: 296 - protein, 977 aa, Artificial Sequence
  CasX variant
MQEIKRINKIRRRLVKDSNTKKAGKTGPMKTLLVRVMTPDLRERLENLRKKPENIPQPISNTSRANLNKLLTDYTEMKKAILHVYWEEFQKDPVGLMSRVAQPAPKNIDQRKLIPVKDGNERLTSSGFACSQCCQPLYVYKLEQVNDKGKPHTNYFGRCNVSEHERLILLSPHKPEANDELVTYSLGKFGQRALDFYSIHVTRESNHPVKPLEQIGGNSCASGPVGKALSDACMGAVASFLTKYQDIILEHQKVIKKNEKRLANLKDIASANGLAFPKITLPPQPHTKEGIEAYNNVVAQIVIWVNLNLWQKLKIGRDEAKPLQRLKGFPSFPLVERQANEVDWWDMVCNVKKLINEKKEDGKVFWQNLAGYKRQEALRPYLSSEEDRKKGKKFARYQLGDLLLHLEKKHGEDWGKVYDEAWERIDKKVEGLSKHIKLEEERRSEDAQSKAALTDWLRAKASFVIEGLKEADKDEFSRCELKLQKWYGDLRGKPFAIEAENSILDISGFSKQYNCAFIWQKDGVKKLNLYLIINYFKGGKLRFKKIKPEAFEANRFYTVINKKSGEIVPMEVNFNFDDPNLIILPLAFGKRQGREFIWNDLLSLETGSLKLANGRVIEKTLYNRRTRQDEPALFVALTFERREVLDSSNIKPMNLIGVDRGENIPAVIALTDPEGCPLSRFKDSLGNPTHILRIGESYKEKQRTIQAKKEVEQRRAGGYSRKYASKAKNLADDMVRNTARDLLYYAVTQDAMLIFENLSRGFGRQGKRTFMAERQYTRMEDWLTAKLAYEGLSKTYLSKTLAQYTSKTCSNCGFTITSADYDRVLEKLKKTATGWMTTINGKELKVEGQITYYNRRKRQNVVKDLSVELDRLSEESVNNDISSWTKGRSGEALSLLKKRFSHRPVQEKFVCLNCGFETHADEQAALNIARSWLFLRSQEYKKYQTNKTTGNTDKRAFVETWQSFYRKKLKEVWKPAV

SEQ ID NO: 297 - protein, 977 aa, Artificial Sequence
  CasX variant
MQEIKRINKIRRRLVKDSNTKKAGKTGPMKTLLVRVMTPDLRERLENLRKKPENIPQPISNTSRANLNKLLTDYTEMKKAILHVYWEEFQKDPVGLMSRVAQPAPKNIDQRKLIPVKDGNERLTSSGFACSQCCQPLYVYKLEQVNDKGKPHTNYFGRCNVSEHERLILLSPHKPEANDELVTYSLGKFGQRALDFYSIHVTRESNHPVKPLEQIGGNSCASGPVGKALSDACMGAVASFLTKYQDIILEHQKVIKKNEKRLANLKDIASANGLAFPKITLPPQPHTKEGIEAYNNVVAQIVIWVNLNLWQKLKIGRDEAKPLQRLKGFPSFPLVERQANEVDWWDMVCNVKKLINEKKEDGKVFWQNLAGYKRQEALRPYLSSEEDRKKGKKFARYQLGDLLKHLEKKHGEDWGKVYDEAWERIDKKVEGLSKHIKLEEERRSEDAQSKAALTDWLRAKASFVIEGLKEADKDEFCRCELKLQKWYGDLRGKPFAIEAENSILDISGFSKQYNCAFIWQKDGVKKLNLYLIINYFKGGKLRFKKIKPEAFEANRFYTVINKKSGEIVPMEVNFNFDDPNLIILPLAFGKRQGREFIWNDLLSLETGSLKLANGRVIEKTLYNRRTRQDEPALFVALTFERREVLDSSNIKPMNLIGVDRGENIPAVIALTDPEGCPLSRFKDSLGNPTHILRIGESYKEKQRTIQAKKEVEQRRAGGYSRKYASKAKNLADDMVRNTARDLLYYAVTQDAMLIFENLSRGFGRQGKRTFMAERQYTRMEDWLTAKLAYEGLSKTYLSKTLAQYTSKTCSNCGFTITSADYDRVLEKLKKTATGWMTTINGKELKVEGQITYYNRRKRQNVVKDLSVELDRLSEESVNNDISSWTKGRSGEALSLLKKRFSHRPVQEKFVCLNCGFETHADEQAALNIARSWLFLRSQEYKKYQTNKTTGNTDKRAFVETWQSFYRKKLKEVWKPAV

SEQ ID NO: 298 - protein, 977 aa, Artificial Sequence
  CasX variant
MQEIKRINKIRRRLVKDSNTKKAGKTGPMKTLLVRVMTPDLRERLENLRKKPENIPQPISNTSRANLNKLLTDYTEMKKAILHVYWEEFQKDPVGLMSRVAQPAPKNIDQRKLIPVKDGNERLTSSGFACSQCCQPLYVYKLEQVNDKGKPHTNYFGRCNVSEHERLILLSPHKPEANDELVTYSLGKFGQRALDFYSIHVTRESNHPVKPLEQIGGNSCASGPVGKALSDACMGAVASFLTKYQDIILEHQKVIKKNEKRLANLKDIASANGLAFPKITLPPQPHTKEGIEAYNNVVAQIVIWVNLNLWQKLKIGRDEAKPLQRLKGFPSFPLVERQANEVDWWDMVCNVKKLINEKKEDGKVFWQNLAGYKRQEALRPYLSSENDRKKGKKFARYQLGDLLKHLEKKHGEDWGKVYDEAWERIDKKVEGLSKHIKLEEERRSEDAQSKAALTDWLRAKASFVIEGLKEADKDEFSRCELKLQKWYGDLRGKPFAIEAENSILDISGFSKQYNCAFIWQKDGVKKLNLYLIINYFKGGKLRFKKIKPEAFEANRFYTVINKKSGEIVPMEVNFNFDDPNLIILPLAFGKRQGREFIWNDLLSLETGSLKLANGRVIEKTLYNRRTRQDEPALFVALTFERREVLDSSNIKPMNLIGVDRGENIPAVIALTDPEGCPLSRFKDSLGNPTHILRIGESYKEKQRTIQAKKEVEQRRAGGYSRKYASKAKNLADDMVRNTARDLLYYAVTQDAMLIFENLSRGFGRQGKRTFMAERQYTRMEDWLTAKLAYEGLSKTYLSKTLAQYTSKTCSNCGFTITSADYDRVLEKLKKTATGWMTTINGKELKVEGQITYYNRRKRQNVVKDLSVELDRLSEESVNNDISSWTKGRSGEALSLLKKRFSHRPVQEKFVCLNCGFETHADEQAALNIARSWLFLRSQEYKKYQTNKTTGNTDKRAFVETWQSFYRKKLKEVWKPAV

SEQ ID NO: 299 - protein, 977 aa, Artificial Sequence
  CasX variant
MQEIKRINKIRRRLVKDSNTKKAGKTGPMKTLLVRVMTPDLRERLENLRKKPENIPQPISNTSRANLNKLLTDYTEMKKAILHVYWEEFQKDPVGLMSRVAQPAPKNIDQRKLIPVKDGNERLTSSGFACSQCCQPLYVYKLEQVNDKGKPHTNYFGRCNVSEHERLILLSPHKPEANDELVTYSLGKFGQRALDFYSIHVTRESNHPVKPLEQIGGNSCASGPVGKALSDACMGAVASFLTKYQDIILEHQKVIKKNEKRLANLKDIASANGLAFPKITLPPQPHTKEGIEAYNNVVAQIVIWVNLNLWQKLKIGRDEAKPLQRLKGFPSFPLVERQANEVDWWDMVCNVKKLINEKKEDGKVFWQNLAGYKRQEALRPYLSSEEDRKKGKKFARYQLGDLLLHLEKKHGEDWGKVYDEAWERIDKKVEGLSKHIKLEEERRSEDAQSKAALTDWLRAKASFVIEGLKEADKDEFCRCELKLQKWYGDLRGKPFAIEAENSILDISGFSKQYNCAFIWQKDGVKKLNLYLIINYFKGGKLRFKKIKPEAFEANRFYTVINKKSGEIVPMEVNFNFDDPNLIILPLAFGKRQGREFIWNDLLSLETGSLKLANGRVIEKTLYNRRTRQDEPALFVALTFERREVLDSSNIKPMNLIGVDRGENIPAVIALTDPEGCPLSRFKDSLGNPTHILRIGESYKEKQRTIQAKKEVEQRRAGGYSRKYASKAKNLADDMVRNTARDLLYYAVTQDAMLIFENLSRGFGRQGKRTFMAERQYTRMEDWLTAKLAYEGLSKTLLSKTLAQYTSKTCSNCGFTITSADYDRVLEKLKKTATGWMTTINGKELKVEGQITYYNRRKRQNVVKDLSVELDRLSEESVNNDISSWTKGRSGEALSLLKKRFSHRPVQEKFVCLNCGFETHADEQAALNIARSWLFLRSQEYKKYQTNKTTGNTDKRAFVETWQSFYRKKLKEVWKPAV

SEQ ID NO: 300 - protein, 977 aa, Artificial Sequence
  CasX variant
MQEIKRINKIRRRLVKDSNTKKAGKTGPMKTLLVRVMTPDLRERLENLRKKPENIPQPISNTSRANLNKLLTDYTEMKKAILHVYWEEFQKDPVGLMSRVAQPAPKNIDQRKLIPVKDGNERLTSSGFACSQCCQPLYVYKLEQVNDKGKPHTNYFGRCNVSEHERLILLSPHKPEANDELVTYSLGKFGQRALDFYSIHVTRESNHPVKPLEQIGGNSCASGPVGKALSDACMGAVASFLTKYQDIILEHQKVIKKNEKRLANLKDIASANGLAFPKITLPPQPHTKEGIEAYNNVVAQIVIWVNLNLWQKLKIGRDEAKPLQRLKGFPSFPLVERQANEVDWWDMVCNVKKLINEKKEDGKVFWQNLAGYKRQEALRPYLSSENDRKKGKKFARYQLGDLLLHLEKKHGEDWGKVYDEAWERIDKKVEGLSKHIKLEEERRSEDAQSKAALTDWLRAKASFVIEGLKEADKDEFCRCELKLQKWYGDLRGKPFAIEAENSILDISGFSKQYNCAFIWQKDGVKKLNLYLIINYFKGGKLRFKKIKPEAFEANRFYTVINKKSGEIVPMEVNFNFDDPNLIILPLAFGKRQGREFIWNDLLSLETGSLKLANGRVIEKTLYNRRTRQDEPALFVALTFERREVLDSSNIKPMNLIGVDRGENIPAVIALTDPEGCPLSRFKDSLGNPTHILRIGESYKEKQRTIQAKKEVEQRRAGGYSRKYASKAKNLADDMVRNTARDLLYYAVTQDAMLIFENLSRGFGRQGKRTFMAERQYTRMEDWLTAKLAYEGLSKTLLSKTLAQYTSKTCSNCGFTITSADYDRVLEKLKKTATGWMTTINGKELKVEGQITYYNRRKRQNVVKDLSVELDRLSEESVNNDISSWTKGRSGEALSLLKKRFSHRPVQEKFVCLNCGFETHADEQAALNIARSWLFLRSQEYKKYQTNKTTGNTDKRAFVETWQSFYRKKLKEVWKPAV

SEQ ID NO: 301 - protein, 977 aa, Artificial Sequence
  CasX variant
MQEIKRINKIRRRLVKDSNTKKAGKTGPMKTLLVRVMTPDLRERLENLRKKPENIPQPISNTSRANLNKLLTDYTEMKKAILHVYWEEFQKDPVGLMSRVAQPAPKNIDQRKLIPVKDGNERLTSSGFACSQCCQPLYVYKLEQVNDKGKPHTNYFGRCNVSEHERLILLSPHKPEANDELVTYSLGKFGQRALDFYSIHVTRESNHPVKPLEQIGGNSCASGPVGKALSDACMGAVASFLTKYQDIILEHQKVIKKNEKRLANLKDIASANGLAFPKITLPPQPHTKEGIEAYNNVVAQIVIWVNLNLWQKLKIGRDEAKPLQRLKGFPSFPLVERQANEVDWWDMVCNVKKLINEKKEDGKVFWQNLAGYKRQEALRPYLSSENDRKKGKKFARYQLGDLLKHLEKKHGEDWGKVYDEAWERIDKKVEGLSKHIKLEEERRSEDAQSKAALTDWLRAKASFVIEGLKEADKDEFSRCELKLQKWYGDLRGKPFAIEAENSILDISGFSKQYNCAFIWQKDGVKKLNLYLIINYFKGGKLRFKKIKPEAFEANRFYTVINKKSGEIVPMEVNFNFDDPNLIILPLAFGKRQGREFIWNDLLSLETGSLKLANGRVIEKTLYNRRTRQDEPALFVALTFERREVLDSSNIKPMNLIGVDRGENIPAVIALTDPEGCPLSRFKDSLGNPTHILRIGESYKEKQRTIQAKKEVEQRRAGGYSRKYASKAKNLADDMVRNTARDLLYYAVTQDAMLIFENLSRGFGRQGKRTFMAERQYTRMEDWLTAKLAYEGLSKTLLSKTLAQYTSKTCSNCGFTITSADYDRVLEKLKKTATGWMTTINGKELKVEGQITYYNRRKRQNVVKDLSVELDRLSEESVNNDISSWTKGRSGEALSLLKKRFSHRPVQEKFVCLNCGFETHADEQAALNIARSWLFLRSQEYKKYQTNKTTGNTDKRAFVETWQSFYRKKLKEVWKPAV

SEQ ID NO: 302 - protein, 977 aa, Artificial Sequence
  CasX variant
MQEIKRINKIRRRLVKDSNTKKAGKTGPMKTLLVRVMTPDLRERLENLRKKPENIPQPISNTSRANLNKLLTDYTEMKKAILHVYWEEFQKDPVGLMSRVAQPAPKNIDQRKLIPVKDGNERLTSSGFACSQCCQPLYVYKLEQVNDKGKPHTNYFGRCNVSEHERLILLSPHKPEANDELVTYSLGKFGQRALDFYSIHVTRESNHPVKPLEQIGGNSCASGPVGKALSDACMGAVASFLTKYQDIILEHQKVIKKNEKRLANLKDIASANGLAFPKITLPPQPHTKEGIEAYNNVVAQIVIWVNLNLWQKLKIGRDEAKPLQRLKGFPSFPLVERQANEVDWWDMVCNVKKLINEKKEDGKVFWQNLAGYKRQEALRPYLSSEEDRKKGKKFARYQFGDLLLHLEKKHGEDWGKVYDEAWERIDKKVEGLSKHIKLEEERRSEDAQSKAALTDWLRAKASFVIEGLKEADKDEFCRCELKLQKWYGDLRGKPFAIEAENSILDISGFSKQYNCAFIWQKDGVKKLNLYLIINYFKGGKLRFKKIKPEAFEANRFYTVINKKSGEIVPMEVNFNFDDPNLIILPLAFGKRQGREFIWNDLLSLETGSLKLANGRVIEKTLYNRRTRQDEPALFVALTFERREVLDSSNIKPMNLIGVDRGENIPAVIALTDPEGCPLSRFKDSLGNPTHILRIGESYKEKQRTIQAKKEVEQRRAGGYSRKYASKAKNLADDMVRNTARDLLYYAVTQDAMLIFENLSRGFGRQGKRTFMAERQYTRMEDWLTAKLAYEGLSKTLLSKTLAQYTSKTCSNCGFTITSADYDRVLEKLKKTATGWMTTINGKELKVEGQITYYNRRKRQNVVKDLSVELDRLSEESVNNDISSWTKGRSGEALSLLKKRFSHRPVQEKFVCLNCGFETHADEQAALNIARSWLFLRSQEYKKYQTNKTTGNTDKRAFVETWQSFYRKKLKEVWKPAV

SEQ ID NO: 303 - protein, 977 aa, Artificial Sequence
  CasX variant
MQEIKRINKIRRRLVKDSNTKKAGKTGPMKTLLVRVMTPDLRERLENLRKKPENIPQPISNTSRANLNKLLTDYTEMKKAILHVYWEEFQKDPVGLMSRVAQPAPKNIDQRKLIPVKDGNERLTSSGFACSQCCQPLYVYKLEQVNDKGKPHTNYFGRCNVSEHERLILLSPHKPEANDELVTYSLGKFGQRALDFYSIHVTRESNHPVKPLEQIGGNSCASGPVGKALSDACMGAVASFLTKYQDIILEHQKVIKKNEKRLANLKDIASANGLAFPKITLPPQPHTKEGIEAYNNVVAQIVIWVNLNLWQKLKIGRDEAKPLQRLKGFPSFPLVERQANEVDWWDMVCNVKKLINEKKEDGKVFWQNLAGYKRQEALRPYLSSEEDRKKGKKFARYQFGDLLKHLEKKHGEDWGKVYDEAWERIDKKVEGLSKHIKLEEERRSEDAQSKAALTDWLRAKASFVIEGLKEADKDEFCRCELKLQKWYGDLRGKPFAIEAENSILDISGFSKQYNCAFIWQKDGVKKLNLYLIINYFKGGKLRFKKIKPEAFEANRFYTVINKKSGEIVPMEVNFNFDDPNLIILPLAFGKRQGREFIWNDLLSLETGSLKLANGRVIEKTLYNRRTRQDEPALFVALTFERREVLDSSNIKPMNLIGVDRGENIPAVIALTDPEGCPLSRFKDSLGNPTHILRIGESYKEKQRTIQAKKEVEQRRAGGYSRKYASKAKNLADDMVRNTARDLLYYAVTQDAMLIFENLSRGFGRQGKRTFMAERQYTRMEDWLTAKLAYEGLSKTLLSKTLAQYTSKTCSNCGFTITSADYDRVLEKLKKTATGWMTTINGKELKVEGQITYYNRRKRQNVVKDLSVELDRLSEESVNNDISSWTKGRSGEALSLLKKRFSHRPVQEKFVCLNCGFETHADEQAALNIARSWLFLRSQEYKKYQTNKTTGNTDKRAFVETWQSFYRKKLKEVWKPAV

SEQ ID NO: 304 - protein, 977 aa, Artificial Sequence
  CasX variant
MQEIKRINKIRRRLVKDSNTKKAGKTGPMKTLLVRVMTPDLRERLENLRKKPENIPQPISNTSRANLNKLLTDYTEMKKAILHVYWEEFQKDPVGLMSRVAQPAPKNIDQRKLIPVKDGNERLTSSGFACSQCCQPLYVYKLEQVNDKGKPHTNYFGRCNVSEHERLILLSPHKPEANDELVTYSLGKFGQRALDFYSIHVTRESNHPVKPLEQIGGNSCASGPVGKALSDACMGAVASFLTKYQDIILEHQKVIKKNEKRLANLKDIASANGLAFPKITLPPQPHTKEGIEAYNNVVAQIVIWVNLNLWQKLKIGRDEAKPLQRLKGFPSFPLVERQANEVDWWDMVCNVKKLINEKKEDGKVFWQNLAGYKRQEALRPYLSSENDRKKGKKFARYQFGDLLLHLEKKHGEDWGKVYDEAWERIDKKVEGLSKHIKLEEERRSEDAQSKAALTDWLRAKASFVIEGLKEADKDEFCRCELKLQKWYGDLRGKPFAIEAENSILDISGFSKQYNCAFIWQKDGVKKLNLYLIINYFKGGKLRFKKIKPEAFEANRFYTVINKKSGEIVPMEVNFNFDDPNLIILPLAFGKRQGREFIWNDLLSLETGSLKLANGRVIEKTLYNRRTRQDEPALFVALTFERREVLDSSNIKPMNLIGVDRGENIPAVIALTDPEGCPLSRFKDSLGNPTHILRIGESYKEKQRTIQAKKEVEQRRAGGYSRKYASKAKNLADDMVRNTARDLLYYAVTQDAMLIFENLSRGFGRQGKRTFMAERQYTRMEDWLTAKLAYEGLSKTLLSKTLAQYTSKTCSNCGFTITSADYDRVLEKLKKTATGWMTTINGKELKVEGQITYYNRRKRQNVVKDLSVELDRLSEESVNNDISSWTKGRSGEALSLLKKRFSHRPVQEKFVCLNCGFETHADEQAALNIARSWLFLRSQEYKKYQTNKTTGNTDKRAFVETWQSFYRKKLKEVWKPAV

SEQ ID NO: 305 - protein, 977 aa, Artificial Sequence
  CasX variant
MQEIKRINKIRRRLVKDSNTKKAGKTGPMKTLLVRVMTPDLRERLENLRKKPENIPQPISNTSRANLNKLLTDYTEMKKAILHVYWEEFQKDPVGLMSRVAQPAPKNIDQRKLIPVKDGNERLTSSGFACSQCCQPLYVYKLEQVNDKGKPHTNYFGRCNVSEHERLILLSPHKPEANDELVTYSLGKFGQRALDFYSIHVTRESNHPVKPLEQIGGNSCASGPVGKALSDACMGAVASFLTKYQDIILEHQKVIKKNEKRLANLKDIASANGLAFPKITLPPQPHTKEGIEAYNNVVAQIVIWVNLNLWQKLKIGRDEAKPLQRLKGFPSFPLVERQANEVDWWDMVCNVKKLINEKKEDGKVFWQNLAGYKRQEALRPYLSSENDRKKGKKFARYQFGDLLKHLEKKHGEDWGKVYDEAWERIDKKVEGLSKHIKLEEERRSEDAQSKAALTDWLRAKASFVIEGLKEADKDEFSRCELKLQKWYGDLRGKPFAIEAENSILDISGFSKQYNCAFIWQKDGVKKLNLYLIINYFKGGKLRFKKIKPEAFEANRFYTVINKKSGEIVPMEVNFNFDDPNLIILPLAFGKRQGREFIWNDLLSLETGSLKLANGRVIEKTLYNRRTRQDEPALFVALTFERREVLDSSNIKPMNLIGVDRGENIPAVIALTDPEGCPLSRFKDSLGNPTHILRIGESYKEKQRTIQAKKEVEQRRAGGYSRKYASKAKNLADDMVRNTARDLLYYAVTQDAMLIFENLSRGFGRQGKRTFMAERQYTRMEDWLTAKLAYEGLSKTLLSKTLAQYTSKTCSNCGFTITSADYDRVLEKLKKTATGWMTTINGKELKVEGQITYYNRRKRQNVVKDLSVELDRLSEESVNNDISSWTKGRSGEALSLLKKRFSHRPVQEKFVCLNCGFETHADEQAALNIARSWLFLRSQEYKKYQTNKTTGNTDKRAFVETWQSFYRKKLKEVWKPAV

SEQ ID NO: 306 - protein, 977 aa, Artificial Sequence
  CasX variant
MQEIKRINKIRRRLVKDSNTKKAGKTGPMKTLLVRVMTPDLRERLENLRKKPENIPQPISNTSRANLNKLLTDYTEMKKAILHVYWEEFQKDPVGLMSRVAQPAPKNIDQRKLIPVKDGNERLTSSGFACSQCCQPLYVYKLEQVNDKGKPHTNYFGRCNVSEHERLILLSPHKPEANDELVTYSLGKFGQRALDFYSIHVTRESNHPVKPLEQIGGNSCASGPVGKALSDACMGAVASFLTKYQDIILEHQKVIKKNEKRLANLKDIASANGLAFPKITLPPQPHTKEGIEAYNNVVAQIVIWVNLNLWQKLKIGRDEAKPLQRLKGFPSFPLVERQANEVDWWDMVCNVKKLINEKKEDGKVFWQNLAGYKRQEALRPYLSSENDRKKGKKFARYQFGDLLLHLEKKHGEDWGKVYDEAWERIDKKVEGLSKHIKLEEERRSEDAQSKAALTDWLRAKASFVIEGLKEADKDEFCRCELKLQKWYGDLRGKPFAIEAENSILDISGFSKQYNCAFIWQKDGVKKLNLYLIINYFKGGKLRFKKIKPEAFEANRFYTVINKKSGEIVPMEVNFNFDDPNLIILPLAFGKRQGREFIWNDLLSLETGSLKLANGRVIEKTLYNRRTRQDEPALFVALTFERREVLDSSNIKPMNLIGIDRGENIPAVIALTDPEGCPLSRFKDSLGNPTHILRIGESYKEKQRTIQAKKEVEQRRAGGYSRKYASKAKNLADDMVRNTARDLLYYAVTQDAMLIFENLSRGFGRQGKRTFMAERQYTRMEDWLTAKLAYEGLSKTYLSKTLAQYTSKTCSNCGFTITSADYDRVLEKLKKTATGWMTTINGKELKVEGQITYYNRRKRQNVVKDLSVELDRLSEESVNNDISSWTKGRSGEALSLLKKRFSHRPVQEKFVCLNCGFETHADEQAALNIARSWLFLRSQEYKKYQTNKTTGNTDKRAFVETWQSFYRKKLKEVWKPAV

SEQ ID NO: 307 - protein, 977 aa, Artificial Sequence
  CasX variant
MQEIKRINKIRRRLVKDSNTKKAGKTGPMKTLLVRVMTPDLRERLENLRKKPENIPQPISNTSRANLNKLLTDYTEMKKAILHVYWEEFQKDPVGLMSRVAQPAPKNIDQRKLIPVKDGNERLTSSGFACSQCCQPLYVYKLEQVNDKGKPHTNYFGRCNVSEHERLILLSPHKPEANDELVTYSLGKFGQRALDFYSIHVTRESNHPVKPLEQIGGNSCASGPVGKALSDACMGAVASFLTKYQDIILEHQKVIKKNEKRLANLKDIASANGLAFPKITLPPQPHTKEGIEAYNNVVAQIVIWVNLNLWQKLKIGRDEAKPLQRLKGFPSFPLVERQANEVDWWDMVCNVKKLINEKKEDGKVFWQNLAGYKRQEALRPYLSSENDRKKGKKFARYQFGDLLKHLEKKHGEDWGKVYDEAWERIDKKVEGLSKHIKLEEERRSEDAQSKAALTDWLRAKASFVIEGLKEADKDEFCRCELKLQKWYGDLRGKPFAIEAENSILDISGFSKQYNCAFIWQKDGVKKLNLYLIINYFKGGKLRFKKIKPEAFEANRFYTVINKKSGEIVPMEVNFNFDDPNLIILPLAFGKRQGREFIWNDLLSLETGSLKLANGRVIEKTLYNRRTRQDEPALFVALTFERREVLDSSNIKPMNLIGIDRGENIPAVIALTDPEGCPLSRFKDSLGNPTHILRIGESYKEKQRTIQAKKEVEQRRAGGYSRKYASKAKNLADDMVRNTARDLLYYAVTQDAMLIFENLSRGFGRQGKRTFMAERQYTRMEDWLTAKLAYEGLSKTYLSKTLAQYTSKTCSNCGFTITSADYDRVLEKLKKTATGWMTTINGKELKVEGQITYYNRRKRQNVVKDLSVELDRLSEESVNNDISSWTKGRSGEALSLLKKRFSHRPVQEKFVCLNCGFETHADEQAALNIARSWLFLRSQEYKKYQTNKTTGNTDKRAFVETWQSFYRKKLKEVWKPAV

SEQ ID NO: 308 - protein, 977 aa, Artificial Sequence
  CasX variant
MQEIKRINKIRRRLVKDSNTKKAGKTGPMKTLLVRVMTPDLRERLENLRKKPENIPQPISNTSRANLNKLLTDYTEMKKAILHVYWEEFQKDPVGLMSRVAQPAPKNIDQRKLIPVKDGNERLTSSGFACSQCCQPLYVYKLEQVNDKGKPHTNYFGRCNVSEHERLILLSPHKPEANDELVTYSLGKFGQRALDFYSIHVTRESNHPVKPLEQIGGNSCASGPVGKALSDACMGAVASFLTKYQDIILEHQKVIKKNEKRLANLKDIASANGLAFPKITLPPQPHTKEGIEAYNNVVAQIVIWVNLNLWQKLKIGRDEAKPLQRLKGFPSFPLVERQANEVDWWDMVCNVKKLINEKKEDGKVFWQNLAGYKRQEALRPYLSSPEDRKKGKKFARYQFGDLLLHLEKKHGEDWGKVYDEAWERIDKKVEGLSKHIKLEEERRSEDAQSKAALTDWLRAKASFVIEGLKEADKDEFCRCELKLQKWYGDLRGKPFAIEAENSILDISGFSKQYNCAFIWQKDGVKKLNLYLIINYFKGGKLRFKKIKPEAFEANRFYTVINKKSGEIVPMEVNFNFDDPNLIILPLAFGKRQGREFIWNDLLSLETGSLKLANGRVIEKTLYNRRTRQDEPALFVALTFERREVLDSSNIKPMNLIGIDRGENIPAVIALTDPEGCPLSRFKDSLGNPTHILRIGESYKEKQRTIQAKKEVEQRRAGGYSRKYASKAKNLANDMVRNTARDLLYYAVTQDAMLIFENLSRGFGRQGKRTFMAERQYTRMEDWLTAKLAYEGLSKTYLSKTLAQYTSKTCSNCGFTITSADYDRVLEKLKKTATGWMTTINGKELKVEGQITYYNRRKRQNVVKDLSVELDRLSEESVNNDISSWTKGRSGEALSLLKKRFSHRPVQEKFVCLNCGFETHADEQAALNIARSWLFLRSQEYKKYQTNKTTGNTDKRAFVETWQSFYRKKLKEVWKPAV

SEQ ID NO: 309 - protein, 977 aa, Artificial Sequence
  CasX variant
MQEIKRINKIRRRLVKDSNTKKAGKTGPMKTLLVRVMTPDLRERLENLRKKPENIPQPISNTSRANLNKLLTDYTEMKKAILHVYWEEFQKDPVGLMSRVAQPAPKNIDQRKLIPVKDGNERLTSSGFACSQCCQPLYVYKLEQVNDKGKPHTNYFGRCNVSEHERLILLSPHKPEANDELVTYSLGKFGQRALDFYSIHVTRESNHPVKPLEQIGGNSCASGPVGKALSDACMGAVASFLTKYQDIILEHQKVIKKNEKRLANLKDIASANGLAFPKITLPPQPHTKEGIEAYNNVVAQIVIWVNLNLWQKLKIGRDEAKPLQRLKGFPSFPLVERQANEVDWWDMVCNVKKLINEKKEDGKVFWQNLAGYKRQEALRPYLSSPEDRKKGKKFARYQFGDLLLHLEKKHGEDWGKVYDEAWERIDKKVEGLSKHIKLEEERRSEDAQSKAALTDWLRAKASFVIEGLKEADKDEFCRCELKLQKWYGDLRGKPFAIEAENSILDISGFSKQYNCAFIWQKDGVKKLNLYLIINYFKGGKLRFKKIKPEAFEANRFYTVINKKSGEIVPMEVNFNFDDPNLIILPLAFGKRQGREFIWNDLLSLETGSLKLANGRVIEKTLYNRRTRQDEPALFVALTFERREVLDSSNIKPMNLIGVDRGENIPAVIALTDPEGCPLSRFKDSLGNPTHILRIGESYKEKQRTIQAKKEVEQRRAGGYSRKYASKAKNLANDMVRNTARDLLYYAVTQDAMLIFENLSRGFGRQGKRTFMAERQYTRMEDWLTAKLAYEGLSKTYLSKTLAQYTSKTCSNCGFTITSADYDRVLEKLKKTATGWMTTINGKELKVEGQITYYNRRKRQNVVKDLSVELDRLSEESVNNDISSWTKGRSGEALSLLKKRFSHRPVQEKFVCLNCGFETHADEQAALNIARSWLFLRSQEYKKYQTNKTTGNTDKRAFVETWQSFYRKKLKEVWKPAV

SEQ ID NO: 310 - protein, 977 aa, Artificial Sequence
  CasX variant
MQEIKRINKIRRRLVKDSNTKKAGKTGPMKTLLVRVMTPDLRERLENLRKKPENIPQPISNTSRANLNKLLTDYTEMKKAILHVYWEEFQKDPVGLMSRVAQPAPKNIDQRKLIPVKDGNERLTSSGFACSQCCQPLYVYKLEQVNDKGKPHTNYFGRCNVSEHERLILLSPHKPEANDELVTYSLGKFGQRALDFYSIHVTRESNHPVKPLEQIGGNSCASGPVGKALSDACMGAVASFLTKYQDIILEHQKVIKKNEKRLANLKDIASANGLAFPKITLPPQPHTKEGIEAYNNVVAQIVIWVNLNLWQKLKIGRDEAKPLQRLKGFPSFPLVERQANEVDWWDMVCNVKKLINEKKEDGKVFWQNLAGYKRQEALRPYLSSPEDRKKGKKFARYQLGDLLLHLEKKHGEDWGKVYDEAWERIDKKVEGLSKHIKLEEERRSEDAQSKAALTDWLRAKASFVIEGLKEADKDEFCRCELKLQKWYGDLRGKPFAIEAENSILDISGFSKQYNCAFIWQKDGVKKLNLYLIINYFKGGKLRFKKIKPEAFEANRFYTVINKKSGEIVPMEVNFNFDDPNLIILPLAFGKRQGREFIWNDLLSLETGSLKLANGRVIEKTLYNRRTRQDEPALFVALTFERREVLDSSNIKPMNLIGVDRGENIPAVIALTDPEGCPLSRFKDSLGNPTHILRIGESYKEKQRTIQAKKEVEQRRAGGYSRKYASKAKNLANDMVRNTARDLLYYAVTQDAMLIFENLSRGFGRQGKRTFMAERQYTRMEDWLTAKLAYEGLSKTYLSKTLAQYTSKTCSNCGFTITSADYDRVLEKLKKTATGWMTTINGKELKVEGQITYYNRRKRQNVVKDLSVELDRLSEESVNNDISSWTKGRSGEALSLLKKRFSHRPVQEKFVCLNCGFETHADEQAALNIARSWLFLRSQEYKKYQTNKTTGNTDKRAFVETWQSFYRKKLKEVWKPAV

SEQ ID NO: 311 - protein, 977 aa, Artificial Sequence
  CasX variant
MQEIKRINKIRRRLVKDSNTKKAGKTGPMKTLLVRVMTPDLRERLENLRKKPENIPQPISNTSRANLNKLLTDYTEMKKAILHVYWEEFQKDPVGLMSRVAQPAPKNIDQRKLIPVKDGNERLTSSGFACSQCCQPLYVYKLEQVNDKGKPHTNYFGRCNVSEHERLILLSPHKPEANDELVTYSLGKFGQRALDFYSIHVTRESNHPVKPLEQIGGNSCASGPVGKALSDACMGAVASFLTKYQDIILEHQKVIKKNEKRLANLKDIASANGLAFPKITLPPQPHTKEGIEAYNNVVAQIVIWVNLNLWQKLKIGRDEAKPLQRLKGFPSFPLVERQANEVDWWDMVCNVKKLINEKKEDGKVFWQNLAGYKRQEALRPYLSSPNDRKKGKKFARYQFGDLLLHLEKKHGEDWGKVYDEAWERIDKKVEGLSKHIKLEEERRSEDAQSKAALTDWLRAKASFVIEGLKEADKDEFCRCELKLQKWYGDLRGKPFAIEAENSILDISGFSKQYNCAFIWQKDGVKKLNLYLIINYFKGGKLRFKKIKPEAFEANRFYTVINKKSGEIVPMEVNFNFDDPNLIILPLAFGKRQGREFIWNDLLSLETGSLKLANGRVIEKTLYNRRTRQDEPALFVALTFERREVLDSSNIKPMNLIGVDRGENIPAVIALTDPEGCPLSRFKDSLGNPTHILRIGESYKEKQRTIQAKKEVEQRRAGGYSRKYASKAKNLANDMVRNTARDLLYYAVTQDAMLIFENLSRGFGRQGKRTFMAERQYTRMEDWLTAKLAYEGLSKTYLSKTLAQYTSKTCSNCGFTITSADYDRVLEKLKKTATGWMTTINGKELKVEGQITYYNRRKRQNVVKDLSVELDRLSEESVNNDISSWTKGRSGEALSLLKKRFSHRPVQEKFVCLNCGFETHADEQAALNIARSWLFLRSQEYKKYQTNKTTGNTDKRAFVETWQSFYRKKLKEVWKPAV

SEQ ID NO: 312 - protein, 977 aa, Artificial Sequence
  CasX variant
MQEIKRINKIRRRLVKDSNTKKAGKTGPMKTLLVRVMTPDLRERLENLRKKPENIPQPISNTSRANLNKLLTDYTEMKKAILHVYWEEFQKDPVGLMSRVAQPAPKNIDQRKLIPVKDGNERLTSSGFACSQCCQPLYVYKLEQVNDKGKPHTNYFGRCNVSEHERLILLSPHKPEANDELVTYSLGKFGQRALDFYSIHVTRESNHPVKPLEQIGGNSCASGPVGKALSDACMGAVASFLTKYQDIILEHQKVIKKNEKRLANLKDIASANGLAFPKITLPPQPHTKEGIEAYNNVVAQIVIWVNLNLWQKLKIGRDEAKPLQRLKGFPSFPLVERQANEVDWWDMVCNVKKLINEKKEDGKVFWQNLAGYKRQEALRPYLSSPEDRKKGKKFARYQFGDLLKHLEKKHGEDWGKVYDEAWERIDKKVEGLSKHIKLEEERRSEDAQSKAALTDWLRAKASFVIEGLKEADKDEFCRCELKLQKWYGDLRGKPFAIEAENSILDISGFSKQYNCAFIWQKDGVKKLNLYLIINYFKGGKLRFKKIKPEAFEANRFYTVINKKSGEIVPMEVNFNFDDPNLIILPLAFGKRQGREFIWNDLLSLETGSLKLANGRVIEKTLYNRRTRQDEPALFVALTFERREVLDSSNIKPMNLIGVDRGENIPAVIALTDPEGCPLSRFKDSLGNPTHILRIGESYKEKQRTIQAKKEVEQRRAGGYSRKYASKAKNLANDMVRNTARDLLYYAVTQDAMLIFENLSRGFGRQGKRTFMAERQYTRMEDWLTAKLAYEGLSKTYLSKTLAQYTSKTCSNCGFTITSADYDRVLEKLKKTATGWMTTINGKELKVEGQITYYNRRKRQNVVKDLSVELDRLSEESVNNDISSWTKGRSGEALSLLKKRFSHRPVQEKFVCLNCGFETHADEQAALNIARSWLFLRSQEYKKYQTNKTTGNTDKRAFVETWQSFYRKKLKEVWKPAV

SEQ ID NO: 313 - protein, 977 aa, Artificial Sequence
  CasX variant
MQEIKRINKIRRRLVKDSNTKKAGKTGPMKTLLVRVMTPDLRERLENLRKKPENIPQPISNTSRANLNKLLTDYTEMKKAILHVYWEEFQKDPVGLMSRVAQPAPKNIDQRKLIPVKDGNERLTSSGFACSQCCQPLYVYKLEQVNDKGKPHTNYFGRCNVSEHERLILLSPHKPEANDELVTYSLGKFGQRALDFYSIHVTRESNHPVKPLEQIGGNSCASGPVGKALSDACMGAVASFLTKYQDIILEHKKVIKKNEKRLANLKDIASANGLAFPKITLPPQPHTKEGIEAYNNVVAQIVIWVNLNLWQKLKIGRDEAKPLQRLKGFPSFPLVERQANEVDWWDMVCNVKKLINEKKEDGKVFWQNLAGYKRQEALRPYLSSPEDRKKGKKFARYQFGDLLLHLEKKHGEDWGKVYDEAWERIDKKVEGLSKHIKLEEERRSEDAQSKAALTDWLRAKASFVIEGLKEADKDEFCRCELKLQKWYGDLRGKPFAIEAENSILDISGFSKQYNCAFIWQKDGVKKLNLYLIINYFKGGKLRFKKIKPEAFEANRFYTVINKKSGEIVPMEVNFNFDDPNLIILPLAFGKRQGREFIWNDLLSLETGSLKLANGRVIEKPLYNRRTRQDEPALFVALTFERREVLDSSNIKPMNLIGIDRGENIPAVIALTDPEGCPLSRFKDSLGNPTHILRIGESYKEKQRTIQAKKEVEQRRAGGYSRKYASKAKNLADDMVRNTARDLLYYAVTQDAMLIFENLSRGFGRQGKRTFMAERQYTRMEDWLTAKLAYEGLSKTYLSKTLAQYTSKTCSNCGFTITSADYDRVLEKLKKTATGWMTTINGKELKVEGQITYYNRRKRQNVVKDLSVELDRLSEESVNNDISSWTKGRSGEALSLLKKRFSHRPVQEKFVCLNCGFETHADEQAALNIARSWLFLRSQEYKKYQTNKTTGNTDKRAFVETWQSFYRKKLKEVWKPAV

SEQ ID NO: 314 - protein, 977 aa, Artificial Sequence
  CasX variant
MQEIKRINKIRRRLVKDSNTKKAGKTGPMKTLLVRVMTPDLRERLENLRKKPENIPQPISNTSRANLNKLLTDYTEMKKAILHVYWEEFQKDPVGLMSRVAQPAPKNIDQRKLIPVKDGNERLTSSGFACSQCCQPLYVYKLEQVNDKGKPHTNYFGRCNVSEHERLILLSPHKPEANDELVTYSLGKFGQRALDFYSIHVTRESNHPVKPLEQIGGNSCASGPVGKALSDACMGAVASFLTKYQDIILEHKKVIKKNEKRLANLKDIASANGLAFPKITLPPQPHTKEGIEAYNNVVAQIVIWVNLNLWQKLKIGRDEAKPLQRLKGFPSFPLVERQANEVDWWDMVCNVKKLINEKKEDGKVFWQNLAGYKRQEALRPYLSSPEDRKKGKKFARYQFGDLLLHLEKKHGEDWGKVYDEAWERIDKKVEGLSKHIKLEEERRSEDAQSKAALTDWLRAKASFVIEGLKEADKDEFCRCELKLQKWYGDLRGKPFAIEAENSILDISGFSKQYNCAFIWQKDGVKKLNLYLIINYFKGGKLRFKKIKPEAFEANRFYTVINKKSGEIVPMEVNFNFDDPNLIILPLAFGKRQGREFIWNDLLSLETGSLKLANGRVIEKPLYNRRTRQDEPALFVALTFERREVLDSSNIKPMNLIGVDRGENIPAVIALTDPEGCPLSRFKDSLGNPTHILRIGESYKEKQRTIQAKKEVEQRRAGGYSRKYASKAKNLADDMVRNTARDLLYYAVTQDAMLIFENLSRGFGRQGKRTFMAERQYTRMEDWLTAKLAYEGLSKTYLSKTLAQYTSKTCSNCGFTITSADYDRVLEKLKKTATGWMTTINGKELKVEGQITYYNRRKRQNVVKDLSVELDRLSEESVNNDISSWTKGRSGEALSLLKKRFSHRPVQEKFVCLNCGFETHADEQAALNIARSWLFLRSQEYKKYQTNKTTGNTDKRAFVETWQSFYRKKLKEVWKPAV

SEQ ID NO: 315 - protein, 977 aa, Artificial Sequence
  CasX variant
MQEIKRINKIRRRLVKDSNTKKAGKTGPMKTLLVRVMTPDLRERLENLRKKPENIPQPISNTSRANLNKLLTDYTEMKKAILHVYWEEFQKDPVGLMSRVAQPAPKNIDQRKLIPVKDGNERLTSSGFACSQCCQPLYVYKLEQVNDKGKPHTNYFGRCNVSEHERLILLSPHKPEANDELVTYSLGKFGQRALDFYSIHVTRESNHPVKPLEQIGGNSCASGPVGKALSDACMGAVASFLTKYQDIILEHKKVIKKNEKRLANLKDIASANGLAFPKITLPPQPHTKEGIEAYNNVVAQIVIWVNLNLWQKLKIGRDEAKPLQRLKGFPSFPLVERQANEVDWWDMVCNVKKLINEKKEDGKVFWQNLAGYKRQEALRPYLSSPNDRKKGKKFARYQFGDLLLHLEKKHGEDWGKVYDEAWERIDKKVEGLSKHIKLEEERRSEDAQSKAALTDWLRAKASFVIEGLKEADKDEFCRCELKLQKWYGDLRGKPFAIEAENSILDISGFSKQYNCAFIWQKDGVKKLNLYLIINYFKGGKLRFKKIKPEAFEANRFYTVINKKSGEIVPMEVNFNFDDPNLIILPLAFGKRQGREFIWNDLLSLETGSLKLANGRVIEKPLYNRRTRQDEPALFVALTFERREVLDSSNIKPMNLIGVDRGENIPAVIALTDPEGCPLSRFKDSLGNPTHILRIGESYKEKQRTIQAKKEVEQRRAGGYSRKYASKAKNLADDMVRNTARDLLYYAVTQDAMLIFENLSRGFGRQGKRTFMAERQYTRMEDWLTAKLAYEGLSKTYLSKTLAQYTSKTCSNCGFTITSADYDRVLEKLKKTATGWMTTINGKELKVEGQITYYNRRKRQNVVKDLSVELDRLSEESVNNDISSWTKGRSGEALSLLKKRFSHRPVQEKFVCLNCGFETHADEQAALNIARSWLFLRSQEYKKYQTNKTTGNTDKRAFVETWQSFYRKKLKEVWKPAV

SEQ ID NO: 316 - protein, 977 aa, Artificial Sequence
  CasX variant
MQEIKRINKIRRRLVKDSNTKKAGKTGPMKTLLVRVMTPDLRERLENLRKKPENIPQPISNTSRANLNKLLTDYTEMKKAILHVYWEEFQKDPVGLMSRVAQPAPKNIDQRKLIPVKDGNERLTSSGFACSQCCQPLYVYKLEQVNDKGKPHTNYFGRCNVSEHERLILLSPHKPEANDELVTYSLGKFGQRALDFYSIHVTRESNHPVKPLEQIGGNSCASGPVGKALSDACMGAVASFLTKYQDIILEHKKVIKKNEKRLANLKDIASANGLAFPKITLPPQPHTKEGIEAYNNVVAQIVIWVNLNLWQKLKIGRDEAKPLQRLKGFPSFPLVERQANEVDWWDMVCNVKKLINEKKEDGKVFWQNLAGYKRQEALRPYLSSPEDRKKGKKFARYQLGDLLLHLEKKHGEDWGKVYDEAWERIDKKVEGLSKHIKLEEERRSEDAQSKAALTDWLRAKASFVIEGLKEADKDEFCRCELKLQKWYGDLRGKPFAIEAENSILDISGFSKQYNCAFIWQKDGVKKLNLYLIINYFKGGKLRFKKIKPEAFEANRFYTVINKKSGEIVPMEVNFNFDDPNLIILPLAFGKRQGREFIWNDLLSLETGSLKLANGRVIEKPLYNRRTRQDEPALFVALTFERREVLDSSNIKPMNLIGVDRGENIPAVIALTDPEGCPLSRFKDSLGNPTHILRIGESYKEKQRTIQAKKEVEQRRAGGYSRKYASKAKNLADDMVRNTARDLLYYAVTQDAMLIFENLSRGFGRQGKRTFMAERQYTRMEDWLTAKLAYEGLSKTYLSKTLAQYTSKTCSNCGFTITSADYDRVLEKLKKTATGWMTTINGKELKVEGQITYYNRRKRQNVVKDLSVELDRLSEESVNNDISSWTKGRSGEALSLLKKRFSHRPVQEKFVCLNCGFETHADEQAALNIARSWLFLRSQEYKKYQTNKTTGNTDKRAFVETWQSFYRKKLKEVWKPAV

SEQ ID NO: 317 - protein, 977 aa, Artificial Sequence
  CasX variant
MQEIKRINKIRRRLVKDSNTKKAGKTGPMKTLLVRVMTPDLRERLENLRKKPENIPQPISNTSRANLNKLLTDYTEMKKAILHVYWEEFQKDPVGLMSRVAQPAPKNIDQRKLIPVKDGNERLTSSGFACSQCCQPLYVYKLEQVNDKGKPHTNYFGRCNVSEHERLILLSPHKPEANDELVTYSLGKFGQRALDFYSIHVTRESNHPVKPLEQIGGNSCASGPVGKALSDACMGAVASFLTKYQDIILEHKKVIKKNEKRLANLKDIASANGLAFPKITLPPQPHTKEGIEAYNNVVAQIVIWVNLNLWQKLKIGRDEAKPLQRLKGFPSFPLVERQANEVDWWDMVCNVKKLINEKKEDGKVFWQNLAGYKRQEALRPYLSSPEDRKKGKKFARYQFGDLLKHLEKKHGEDWGKVYDEAWERIDKKVEGLSKHIKLEEERRSEDAQSKAALTDWLRAKASFVIEGLKEADKDEFCRCELKLQKWYGDLRGKPFAIEAENSILDISGFSKQYNCAFIWQKDGVKKLNLYLIINYFKGGKLRFKKIKPEAFEANRFYTVINKKSGEIVPMEVNFNFDDPNLIILPLAFGKRQGREFIWNDLLSLETGSLKLANGRVIEKPLYNRRTRQDEPALFVALTFERREVLDSSNIKPMNLIGVDRGENIPAVIALTDPEGCPLSRFKDSLGNPTHILRIGESYKEKQRTIQAKKEVEQRRAGGYSRKYASKAKNLADDMVRNTARDLLYYAVTQDAMLIFENLSRGFGRQGKRTFMAERQYTRMEDWLTAKLAYEGLSKTYLSKTLAQYTSKTCSNCGFTITSADYDRVLEKLKKTATGWMTTINGKELKVEGQITYYNRRKRQNVVKDLSVELDRLSEESVNNDISSWTKGRSGEALSLLKKRFSHRPVQEKFVCLNCGFETHADEQAALNIARSWLFLRSQEYKKYQTNKTTGNTDKRAFVETWQSFYRKKLKEVWKPAV

SEQ ID NO: 318 - protein, 977 aa, Artificial Sequence
  CasX variant
MQEIKRINKIRRRLVKDSNTKKAGKTGPMKTLLVRVMTPDLRERLENLRKKPENIPQPISNTSRANLNKLLTDYTEMKKAILHVYWEEFQKDPVGLMSRVAQPAPKNIDQRKLIPVKDGNERLTSSGFACSQCCQPLYVYKLEQVNDKGKPHTNYFGRCNVSEHERLILLSPHKPEANDELVTYSLGKFGQRALDFYSIHVTRESNHPVKPLEQIGGNSCASGPVGKALSDACMGAVASFLTKYQDIILEHQKVIKKNEKRLANLKDIASANGLAFPKITLPPQPHTKEGIEAYNNVVAQIVIWVNLNLWQKLKIGRDEAKPLQRLKGFPSFPLVERQANEVDWWDMVCNVKKLINEKKEDGKVFWQNLAGYKRQEALRPYLSSENDRKKGKKFARYQFGDLLLHLEKKHGEDWGKVYDEAWERIDKKVEGLSKHIKLEEERRSEDAQSKAALTDWLRAKASFVIEGLKEADKDEFCRCELKLQKWYGDLRGKPFAIEAENSILDISGFSKQYNCAFIWQKDGVKKLNLYLIINYFKGGKLRFKKIKPEAFEANRFYTVINKKSGEIVPMEVNFNFDDPNLIILPLAFGKRQGREFIWNDLLSLETGSLKLANGRVIEKPLYNRRTRQDEPALFVALTFERREVLDSSNIKPMNLIGVDRGENIPAVIALTDPEGCPLSRFKDSLGNPTHILRIGESYKEKQRTIQAKKEVEQRRAGGYSRKYASKAKNLADDMVRNTARDLLYYAVTQDAMLIFENLSRGFGRQGKRTFMAERQYTRMEDWLTAKLAYEGLSKTYLSKTLAQYTSKTCSNCGFTITSADYDRVLEKLKKTATGWMTTINGKELKVEGQITYYNRRKRQNVVKDLSVELDRLSEESVNNDISSWTKGRSGEALSLLKKRFSHRPVQEKFVCLNCGFETHADEQAALNIARSWLFLRSQEYKKYQTNKTTGNTDKRAFVETWQSFYRKKLKEVWKPAV

SEQ ID NO: 319 - protein, 977 aa, Artificial Sequence
  CasX variant
MQEIKRINKIRRRLVKDSNTKKAGKTGPMKTLLVRVMTPDLRERLENLRKKPENIPQPISNTSRANLNKLLTDYTEMKKAILHVYWEEFQKDPVGLMSRVAQPAPKNIDQRKLIPVKDGNERLTSSGFACSQCCQPLYVYKLEQVNDKGKPHTNYFGRCNVSEHERLILLSPHKPEANDELVTYSLGKFGQRALDFYSIHVTRESNHPVKPLEQIGGNSCASGPVGKALSDACMGAVASFLTKYQDIILEHKKVIKKNEKRLANLKDIASANGLAFPKITLPPQPHTKEGIEAYNNVVAQIVIWVNLNLWQKLKIGRDEAKPLQRLKGFPSFPLVERQANEVDWWDMVCNVKKLINEKKEDGKVFWQNLAGYKRQEALRPYLSSPEDRKKGKKFARYQFGDLLLHLEKKHGEDWGKVYDEAWERIDKKVEGLSKHIKLEEERRSEDAQSKAALTDWLRAKASFVIEGLKEADKDEFCRCELKLQKWYGDLRGKPFAIEAENSILDISGFSKQYNCAFIWQKDGVKKLNLYLIINYFKGGKLRFKKIKPEAFEANRFYTVINKKSGEIVPMEVNFNFDDPNLIILPLAFGKRQGREFIWNDLLSLETGSLKLANGRVIEKPLYNRRTRQDEPALFVALTFERREVLDSSNIKPMNLIGIDRGENIPAVIALTDPEGCPLSRFKDSLGNPTHILRIGESYKEKQRTIQAKKEVEQRRAGGYSRKYASKAKNLADDMVRNTARDLLYYAVTQDAMLIFENLSRGFGRQGKRTFMAERQYTRMEDWLTAKLAYEGLSKTYLSKTLAQYTSKTCSNCGFTITSADYDRVLEKLKKTATGWMTTINGKELKVEGQITYYNRYKRQNVVKDLSVELDRLSEESVNNDISSWTKGRSGEALSLLKKRFSHRPVQEKFVCLNCGFETHADEQAALNIARSWLFLRSQEYKKYQTNKTTGNTDKRAFVETWQSFYRKKLKEVWKPAV

SEQ ID NO: 320 - protein, 976 aa, Artificial Sequence
  CasX variant
QEIKRINKIRRRLVKDSNTKKAGKTGPMKTLLVRVMTPDLRERLENLRKKPENIPQPISNTSRANLNKLLTDYTEMKKAILHVYWEEFQKDPVGLMSRVAQPAPKNIDQRKLIPVKDGNERLTSSGFACSQCCQPLYVYKLEQVNDKGKPHTNYFGRCNVSEHERLILLSPHKPEANDELVTYSLGKFGQRALDFYSIHVTRESNHPVKPLEQIGGNSCASGPVGKALSDACMGAVASFLTKYQDIILEHQKVIKKNEKRLANLKDIASANGLAFPKITLPPQPHTKEGIEAYNNVVAQIVIWVNLNLWQKLKIGRDEAKPLQRLKGFPSFPLVERQANEVDWWDMVCNVKKLINEKKEDGKVFWQNLAGYKRQEALRPYLSSEEDRKKGKKFARYQFGDLLLHLEKKHGEDWGKVYDEAWERIDKKVEGLSKHIKLEEERRSEDAQSKAALTDWLRAKASFVIEGLKEADKDEFCRCELKLQKWYGDLRGKPFAIEAENSILDISGFSKQYNCAFIWQKDGVKKLNLYLIINYFKGGKLRFKKIKPEAFEANRFYTVINKKSGEIVPMEVNFNFDDPNLIILPLAFGKRQGREFIWNDLLSLETGSLKLANGRVIEKTLYNRRTRQDEPALFVALTFERREVLDSSNIKPMNLIGIDRGENIPAVIALTDPEGCPLSRFKDSLGNPTHILRIGESYKEKQRTIQAKKEVEQRRAGGYSRKYASKAKNLADDMVRNTARDLLYYAVTQDAMLIFENLSRGFGRQGKRTFMAERQYTRMEDWLTAKLAYEGLSKTYLSKTLAQYTSKTCSNCGFTITSADYDRVLEKLKKTATGWMTTINGKELKVEGQITYYNRYKRQNVVKDLSVELDRLSEESVNNDISSWTKGRSGEALSLLKKRFSHRPVQEKFVCLNCGFETHADEQAALNIARSWLFLRSQEYKKYQTNKTTGNTDKRAFVETWQSFYRKKLKEVWKPAV

SEQ ID NO: 321 - protein, 977 aa, Artificial Sequence; identical to SEQ ID NO: 275
  CasX variant

SEQ ID NO: 322 - protein, 977 aa, Artificial Sequence; identical to SEQ ID NO: 275
  CasX variant

SEQ ID NO: 323 - protein, 977 aa, Artificial Sequence; identical to SEQ ID NO: 275
  CasX variant

SEQ ID NO: 324 - protein, 977 aa, Artificial Sequence; identical to SEQ ID NO: 275
  CasX variant

SEQ ID NO: 325 - protein, 977 aa, Artificial Sequence; identical to SEQ ID NO: 275
  CasX variant

SEQ ID NO: 326 - protein, 978 aa, Artificial Sequence
  CasX variant
MQEIKRINKIRRRLVKDSNTKKAGKTGPMKTLLVRVMTPDLRERLENLRKKPENIPQPISNTSRANLNKLLTDYTEMKKAILHVYWEEFQKDPVGLMSRVAQPAPKNIDQRKLIPVKDGNERLTMSSGFACSQCCQPLYVYKLEQVNDKGKPHTNYFGRCNVSEHERLILLSPHKPEANDELVTYSLGKFGQRALDFYSIHVTRESNHPVKPLEQIGGNSCASGPVGKALSDACMGAVASFLTKYQDIILEHQKVIKKNEKRLANLKDIASANGLAFPKITLPPQPHTKEGIEAYNNVVAQIVIWVNLNLWQKLKIGRDEAKPLQRLKGFPSFPLVERQANEVDWWDMVCNVKKLINEKKEDGKVFWQNLAGYKRQEALRPYLSSEEDRKKGKKFARYQFGDLLLHLEKKHGEDWGKVYDEAWERIDKKVEGLSKHIKLEEERRSEDAQSKAALTDWLRAKASFVIEGLKEADKDEFCRCELKLQKWYGDLRGKPFAIEAENSILDISGFSKQYNCAFIWQKDGVKKLNLYLIINYFKGGKLRFKKIKPEAFEANRFYTVINKKSGEIVPMEVNFNFDDPNLIILPLAFGKRQGREFIWNDLLSLETGSLKLANGRVIEKTLYNRRTRQDEPALFVALTFERREVLDSSNIKPMNLIGIDRGENIPAVIALTDPEGCPLSRFKDSLGNPTHILRIGESYKEKQRTIQAKKEVEQRRAGGYSRKYASKAKNLADDMVRNTARDLLYYAVTQDAMLIFENLSRGFGRQGKRTFMAERQYTRMEDWLTAKLAYEGLSKTYLSKTLAQYTSKTCSNCGFTITSADYDRVLEKLKKTATGWMTTINGKELKVEGQITYYNRYKRQNVVKDLSVELDRLSEESVNNDISSWTKGRSGEALSLLKKRFSHRPVQEKFVCLNCGFETHADEQAALNIARSWLFLRSQEYKKYQTNKTTGNTDKRAFVETWQSFYRKKLKEVWKPAV

SEQ ID NO: 327 - protein, 977 aa, Artificial Sequence; identical to SEQ ID NO: 275
  CasX variant

SEQ ID NO: 328 - protein, 977 aa, Artificial Sequence; identical to SEQ ID NO: 275
  CasX variant

SEQ ID NO: 329 - protein, 977 aa, Artificial Sequence; identical to SEQ ID NO: 275
  CasX variant

SEQ ID NO: 330 - protein, 977 aa, Artificial Sequence; identical to SEQ ID NO: 275
  CasX variant

SEQ ID NO: 331 - protein, 977 aa, Artificial Sequence; identical to SEQ ID NO: 275
  CasX variant

SEQ ID NO: 332 - protein, 977 aa, Artificial Sequence; identical to SEQ ID NO: 275
  CasX variant

SEQ ID NO: 333 - protein, 977 aa, Artificial Sequence
  CasX variant
QEIKRINKIRRRLVKDSNTKKAGKTGPMKTLLVRVMTPDLRERLENLRKKPENIPQPISNTSRANLNKLLTDYTEMKKAILHVYWEEFQKDPVGLMSRVAQPASKKIDQNKLKPEMDEKGNLTTAGFACSQCGQPLFVYKLEQVSEKGKAYTNYFGRCNVAEHEKLILLAQLKPEKDSDEAVTYSLGKFGQRALDFYSIHVTRESNHPVKPLEQIGGNSCASGPVGKALSDACMGAVASFLTKYQDIILEHQKVIKKNEKRLANLKDIASANGLAFPKITLPPQPHTKEGIEAYNNVVAQIVIWVNLNLWQKLKIGRDEAKPLQRLKGFPSFPLVERQANEVDWWDMVCNVKKLINEKKEDGKVFWQNLAGYKRQEALRPYLSSEEDRKKGKKFARYQFGDLLLHLEKKHGEDWGKVYDEAWERIDKKVEGLSKHIKLEEERRSEDAQSKAALTDWLRAKASFVIEGLKEADKDEFCRCELKLQKWYGDLRGKPFAIEAENSILDISGFSKQYNCAFIWQKDGVKKLNLYLIINYFKGGKLRFKKIKPEAFEANRFYTVINKKSGEIVPMEVNFNFDDPNLIILPLAFGKRQGREFIWNDLLSLETGSLKLANGRVIEKTLYNRRTRQDEPALFVALTFERREVLDSSNIKPMNLIGIDRGENIPAVIALTDPEGCPLSRFKDSLGNPTHILRIGESYKEKQRTIQAKKEVEQRRAGGYSRKYASKAKNLADDMVRNTARDLLYYAVTQDAMLIFENLSRGFGRQGKRTFMAERQYTRMEDWLTAKLAYEGLSKTYLSKTLAQYTSKTCSNCGFTITSADYDRVLEKLKKTATGWMTTINGKELKVEGQITYYNRYKRQNVVKDLSVELDRLSEESVNNDISSWTKGRSGEALSLLKKRFSHRPVQEKFVCLNCGFETHADEQAALNIARSWLFLRSQEYKKYQTNKTTGNTDKRAFVETWQSFYRKKLKEVWKPAV

SEQ ID NO: 334 - protein, 976 aa, Artificial Sequence
  CasX variant
QEIKRINKIRRRLVKDSNTKKAGKTGPMKTLLVRVMTPDLRERLENLRKKPENIPQPISNTSRANLNKLLTDYTEMKKAILHVYWEEFQKDPVGLMSRVAQPAPKNIDQRKLIPVKDGNERLTSSGFACSQCCQPLYVYKLEQVNDKGKPHTNYFGRCNVSEHERLILLSPHKPEANDELVTYSLGKFGQRALDFYSIHVTKESTHPVKPLAQIAGNRYASGPVGKALSDACMGTIASFLSKYQDIIIEHQKVVKGNQKRLESLRELAGKENLEYPSVTLPPQPHTKEGVDAYNEVIARVRMWVNLNLWQKLKLSRDDAKPLLRLKGFPSFPLVERQANEVDWWDMVCNVKKLINEKKEDGKVFWQNLAGYKRQEALRPYLSSEEDRKKGKKFARYQFGDLLLHLEKKHGEDWGKVYDEAWERIDKKVEGLSKHIKLEEERRSEDAQSKAALTDWLRAKASFVIEGLKEADKDEFCRCELKLQKWYGDLRGKPFAIEAENSILDISGFSKQYNCAFIWQKDGVKKLNLYLIINYFKGGKLRFKKIKPEAFEANRFYTVINKKSGEIVPMEVNFNFDDPNLIILPLAFGKRQGREFIWNDLLSLETGSLKLANGRVIEKTLYNRRTRQDEPALFVALTFERREVLDSSNIKPMNLIGIDRGENIPAVIALTDPEGCPLSRFKDSLGNPTHILRIGESYKEKQRTIQAKKEVEQRRAGGYSRKYASKAKNLADDMVRNTARDLLYYAVTQDAMLIFENLSRGFGRQGKRTFMAERQYTRMEDWLTAKLAYEGLSKTYLSKTLAQYTSKTCSNCGFTITSADYDRVLEKLKKTATGWMTTINGKELKVEGQITYYNRYKRQNVVKDLSVELDRLSEESVNNDISSWTKGRSGEALSLLKKRFSHRPVQEKFVCLNCGFETHADEQAALNIARSWLFLRSQEYKKYQTNKTTGNTDKRAFVETWQSFYRKKLKEVWKPAV

SEQ ID NO: 335 - protein, 976 aa, Artificial Sequence
  CasX variant
QEIKRINKIRRRLVKDSNTKKAGKTGPMKTLLVRVMTPDLRERLENLRKKPENIPQPISNTSRANLNKLLTDYTEMKKAILHVYWEEFQKDPVGLMSRVAQPAPKNIDQRKLIPVKDGNERLTSSGFACSQCCQPLYVYKLEQVNDKGKPHTNYFGRCNVSEHERLILLSPHKPEANDELVTYSLGKFGQRALDFYSIHVTKESTHPVKPLAQIAGNRYASGPVGKALSDACMGTIASFLSKYQDIIIEHQKVVKGNQKRLESLRELAGKENLEYPSVTLPPQPHTKEGVDAYNEVIARVRMWVNLNLWQKLKLSRDDAKPLLRLKGFPSFPLVERQANEVDWWDMVCNVKKLINEKKEDGKVFWQNLAGYKRQEALRPYLSSEEDRKKGKKFARYQLGDLLLHLEKKHGEDWGKVYDEAWERIDKKVEGLSKHIKLEEERRSEDAQSKAALTDWLRAKASFVIEGLKEADKDEFCRCELKLQKWYGDLRGKPFAIEAENSILDISGFSKQYNCAFIWQKDGVKKLNLYLIINYFKGGKLRFKKIKPEAFEANRFYTVINKKSGEIVPMEVNFNFDDPNLIILPLAFGKRQGREFIWNDLLSLETGSLKLANGRVIEKTLYNRRTRQDEPALFVALTFERREVLDSSNIKPMNLIGVDRGENIPAVIALTDPEGCPLSRFKDSLGNPTHILRIGESYKEKQRTIQAKKEVEQRRAGGYSRKYASKAKNLADDMVRNTARDLLYYAVTQDAMLIFENLSRGFGRQGKRTFMAERQYTRMEDWLTAKLAYEGLSKTYLSKTLAQYTSKTCSNCGFTITSADYDRVLEKLKKTATGWMTTINGKELKVEGQITYYNRRKRQNVVKDLSVELDRLSEESVNNDISSWTKGRSGEALSLLKKRFSHRPVQEKFVCLNCGFETHADEQAALNIARSWLFLRSQEYKKYQTNKTTGNTDKRAFVETWQSFYRKKLKEVWKPAV

SEQ ID NO: 336 - protein, 975 aa, Artificial Sequence
  CasX variant
QEIKRINKIRRRLVKDSNTKKAGKTGPMKTLLVRVMTPDLRERLENLRKKPENIPQPISNTSRANLNKLLTDYTEMKKAILHVYWEEFQKDPVGLMSRVAQPAPKNIDQRKLIPVKDGNERLTSSGFACSQCCQPLYVYKLEQVNDKGKPHTNYFGRCNVSEHERLILLSPHKPEANDELVTYSLGKFGQRALDFYSIHVTKESTHPVKPLAQIAGNRYASGPVGKALSDACMGTIASFLSKYQDIIIEHQKVVKGNQKRLESLRELAGKENLEYPSVTLPPQPHTKEGVDAYNEVIARVRMWVNLNLWQKLKLSRDDAKPLLRLKGFPSFPLVERQANEVDWWDMVCNVKKLINEKKEDGKVFQNLAGYKRQEALRPYLSSEEDRKKGKKFARYQLGDLLKHLEKKHGEDWGKVYDEAWERIDKKVEGLSKHIKLEEERRSEDAQSKAALTDWLRAKASFVIEGLKEADKDEFCRCELKLQKWYGDLRGKPFAIEAENSILDISGFSKQYNCAFIWQKDGVKKLNLYLIINYFKGGKLRFKKIKPEAFEANRFYTVINKKSGEIVPMEVNFNFDDPNLIILPLAFGKRQGREFIWNDLLSLETGSLKLANGRVIEKTLYNRRTRQDEPALFVALTFERREVLDSSNIKPMNLIGVDRGENIPAVIALTDPEGCPLSRFKDSLGNPTHILRIGESYKEKQRTIQAKKEVEQRRAGGYSRKYASKAKNLADDMVRNTARDLLYYAVTQDAMLIFENLSRGFGRQGKRTFMAERQYTRMEDWLTAKLAYEGLSKTYLSKTLAQYTSKTCSNCGFTITSADYDRVLEKLKKTATGWMTTINGKELKVEGQITYYNRRKRQNVVKDLSVELDRLSEESVNNDISSWTKGRSGEALSLLKKRFSHRPVQEKFVCLNCGFETHADEQAALNIARSWLFLRSQEYKKYQTNKTTGNTDKRAFVETWQSFYRKKLKEVWKPAV

SEQ ID NO: 337 - protein, 976 aa, Artificial Sequence
  CasX variant
QEIKRINKIRRRLVKDSNTKKAGKTGPMKTLLVRVMTPDLRERLENLRKKPENIPQPISNTSRANLNKLLTDYTEMKKAILHVYWEEFQKDPVGLMSRVAQPAPKNIDQRKLIPVKDGNERLTSSGFACSQCCQPLYVYKLEQVNDKGKPHTNYFGRCNVSEHERLILLSPHKPEANDELVTYSLGKFGQRALDFYSIHVTKESTHPVKPLAQIAGNRYASGPVGKALSDACMGTIASFLSKYQDIIIEHQKVVKGNQKRLESLRELAGKENLEYPSVTLPPQPHTKEGVDAYNEVIARVRMWVNLNLWQKLKLSRDDAKPLLRLKGFPSFPLVERQANEVDWWDMVCNVKKLINEKKEDGKVFWQNLAGYKRQEALRPYLSSEEDRKKGKKFARYQLGDLLLHLEKKHGEDWGKVYDEAWERIDKKVEGLSKHIKLEEERRSEDAQSKAALTDWLRAKASFVIEGLKEADKDEFCRCELKLQKWYGDLRGKPFAIEAENSILDISGFSKQYNCAFIWQKDGVKKLNLYLIINYFKGGKLRFKKIKPEAFEANRFYTVINKKSGEIVPMEVNFNFDDPNLIILPLAFGKRQGREFIWNDLLSLETGSLKLANGRVIEKTLYNRRTRQDEPALFVALTFERREVLDSSNIKPMNLIGVDRGENIPAVIALTDPEGCPLSRFKDSLGNPTHILRIGESYKEKQRTIQAKKEVEQRRAGGYSRKYASKAKNLADDMVRNTARDLLYYAVTQDAMLIFENLSRGFGRQGKRTFMAERQYTRMEDWLTAKLAYEGLSKTYLSKTLAQYTSKTCSNCGFTITSADYDRVLEKLKKTATGWMTTINGKELKVEGQITYYNRYKRQNVVKDLSVELDRLSEESVNNDISSWTKGRSGEALSLLKKRFSHRPVQEKFVCLNCGFETHADEQAALNIARSWLFLRSQEYKKYQTNKTTGNTDKRAFVETWQSFYRKKLKEVWKPAV

SEQ ID NO: 338 - protein, 977 aa, Artificial Sequence
  CasX variant
QEIKRINKIRRRLVKDSNTKKAGKTGPMKTLLVRVMTPDLRERLENLRKKPENIPQPISNTSRANLNKLLTDYTEMKKAILHVYWEEFQKDPVGLMSRVAQPASKKIDQNKLKPEMDEKGNLTTAGFACSQCGQPLFVYKLEQVSEKGKAYTNYFGRCNVAEHEKLILLAQLKPEKDSDEAVTYSLGKFGQRALDFYSIHVTKESTHPVKPLAQIAGNRYASGPVGKALSDACMGTIASFLSKYQDIIIEHQKVVKGNQKRLESLRELAGKENLEYPSVTLPPQPHTKEGVDAYNEVIARVRMWVNLNLWQKLKLSRDDAKPLLRLKGFPSFPLVERQANEVDWWDMVCNVKKLINEKKEDGKVFWQNLAGYKRQEALRPYLSSEEDRKKGKKFARYQFGDLLLHLEKKHGEDWGKVYDEAWERIDKKVEGLSKHIKLEEERRSEDAQSKAALTDWLRAKASFVIEGLKEADKDEFCRCELKLQKWYGDLRGKPFAIEAENSILDISGFSKQYNCAFIWQKDGVKKLNLYLIINYFKGGKLRFKKIKPEAFEANRFYTVINKKSGEIVPMEVNFNFDDPNLIILPLAFGKRQGREFIWNDLLSLETGSLKLANGRVIEKTLYNRRTRQDEPALFVALTFERREVLDSSNIKPMNLIGIDRGENIPAVIALTDPEGCPLSRFKDSLGNPTHILRIGESYKEKQRTIQAKKEVEQRRAGGYSRKYASKAKNLADDMVRNTARDLLYYAVTQDAMLIFENLSRGFGRQGKRTFMAERQYTRMEDWLTAKLAYEGLSKTYLSKTLAQYTSKTCSNCGFTITSADYDRVLEKLKKTATGWMTTINGKELKVEGQITYYNRYKRQNVVKDLSVELDRLSEESVNNDISSWTKGRSGEALSLLKKRFSHRPVQEKFVCLNCGFETHADEQAALNIARSWLFLRSQEYKKYQTNKTTGNTDKRAFVETWQSFYRKKLKEVWKPAV

SEQ ID NO: 339 - protein, 977 aa, Artificial Sequence
  CasX variant
QEIKRINKIRRRLVKDSNTKKAGKTGPMKTLLVRVMTPDLRERLENLRKKPENIPQPISNTSRANLNKLLTDYTEMKKAILHVYWEEFQKDPVGLMSRVAQPASKKIDQNKLKPEMDEKGNLTTAGFACSQCGQPLFVYKLEQVSEKGKAYTNYFGRCNVAEHEKLILLAQLKPEKDSDEAVTYSLGKFGQRALDFYSIHVTKESTHPVKPLAQIAGNRYASGPVGKALSDACMGTIASFLSKYQDIIIEHQKVVKGNQKRLESLRELAGKENLEYPSVTLPPQPHTKEGVDAYNEVIARVRMWVNLNLWQKLKLSRDDAKPLLRLKGFPSFPLVERQANEVDWWDMVCNVKKLINEKKEDGKVFWQNLAGYKRQEALRPYLSSEEDRKKGKKFARYQLGDLLLHLEKKHGEDWGKVYDEAWERIDKKVEGLSKHIKLEEERRSEDAQSKAALTDWLRAKASFVIEGLKEADKDEFCRCELKLQKWYGDLRGKPFAIEAENSILDISGFSKQYNCAFIWQKDGVKKLNLYLIINYFKGGKLRFKKIKPEAFEANRFYTVINKKSGEIVPMEVNFNFDDPNLIILPLAFGKRQGREFIWNDLLSLETGSLKLANGRVIEKTLYNRRTRQDEPALFVALTFERREVLDSSNIKPMNLIGVDRGENIPAVIALTDPEGCPLSRFKDSLGNPTHILRIGESYKEKQRTIQAKKEVEQRRAGGYSRKYASKAKNLADDMVRNTARDLLYYAVTQDAMLIFENLSRGFGRQGKRTFMAERQYTRMEDWLTAKLAYEGLSKTYLSKTLAQYTSKTCSNCGFTITSADYDRVLEKLKKTATGWMTTINGKELKVEGQITYYNRRKRQNVVKDLSVELDRLSEESVNNDISSWTKGRSGEALSLLKKRFSHRPVQEKFVCLNCGFETHADEQAALNIARSWLFLRSQEYKKYQTNKTTGNTDKRAFVETWQSFYRKKLKEVWKPAV

SEQ ID NO: 340 - protein, 977 aa, Artificial Sequence
  CasX variant
QEIKRINKIRRRLVKDSNTKKAGKTGPMKTLLVRVMTPDLRERLENLRKKPENIPQPISNTSRANLNKLLTDYTEMKKAILHVYWEEFQKDPVGLMSRVAQPASKKIDQNKLKPEMDEKGNLTTAGFACSQCGQPLFVYKLEQVSEKGKAYTNYFGRCNVAEHEKLILLAQLKPEKDSDEAVTYSLGKFGQRALDFYSIHVTKESTHPVKPLAQIAGNRYASGPVGKALSDACMGTIASFLSKYQDIIIEHQKVVKGNQKRLESLRELAGKENLEYPSVTLPPQPHTKEGVDAYNEVIARVRMWVNLNLWQKLKLSRDDAKPLLRLKGFPSFPLVERQANEVDWWDMVCNVKKLINEKKEDGKVFWQNLAGYKRQEALRPYLSSEEDRKKGKKFARYQLGDLLKHLEKKHGEDWGKVYDEAWERIDKKVEGLSKHIKLEEERRSEDAQSKAALTDWLRAKASFVIEGLKEADKDEFCRCELKLQKWYGDLRGKPFAIEAENSILDISGFSKQYNCAFIWQKDGVKKLNLYLIINYFKGGKLRFKKIKPEAFEANRFYTVINKKSGEIVPMEVNFNFDDPNLIILPLAFGKRQGREFIWNDLLSLETGSLKLANGRVIEKTLYNRRTRQDEPALFVALTFERREVLDSSNIKPMNLIGVDRGENIPAVIALTDPEGCPLSRFKDSLGNPTHILRIGESYKEKQRTIQAKKEVEQRRAGGYSRKYASKAKNLADDMVRNTARDLLYYAVTQDAMLIFENLSRGFGRQGKRTFMAERQYTRMEDWLTAKLAYEGLSKTYLSKTLAQYTSKTCSNCGFTITSADYDRVLEKLKKTATGWMTTINGKELKVEGQITYYNRRKRQNVVKDLSVELDRLSEESVNNDISSWTKGRSGEALSLLKKRFSHRPVQEKFVCLNCGFETHADEQAALNIARSWLFLRSQEYKKYQTNKTTGNTDKRAFVETWQSFYRKKLKEVWKPAV

SEQ ID NO: 341 - protein, 977 aa, Artificial Sequence
  CasX variant
QEIKRINKIRRRLVKDSNTKKAGKTGPMKTLLVRVMTPDLRERLENLRKKPENIPQPISNTSRANLNKLLTDYTEMKKAILHVYWEEFQKDPVGLMSRVAQPASKKIDQNKLKPEMDEKGNLTTAGFACSQCGQPLFVYKLEQVSEKGKAYTNYFGRCNVAEHEKLILLAQLKPEKDSDEAVTYSLGKFGQRALDFYSIHVTKESTHPVKPLAQIAGNRYASGPVGKALSDACMGTIASFLSKYQDIIIEHQKVVKGNQKRLESLRELAGKENLEYPSVTLPPQPHTKEGVDAYNEVIARVRMWVNLNLWQKLKLSRDDAKPLLRLKGFPSFPLVERQANEVDWWDMVCNVKKLINEKKEDGKVFWQNLAGYKRQEALRPYLSSEEDRKKGKKFARYQLGDLLLHLEKKHGEDWGKVYDEAWERIDKKVEGLSKHIKLEEERRSEDAQSKAALTDWLRAKASFVIEGLKEADKDEFCRCELKLQKWYGDLRGKPFAIEAENSILDISGFSKQYNCAFIWQKDGVKKLNLYLIINYFKGGKLRFKKIKPEAFEANRFYTVINKKSGEIVPMEVNFNFDDPNLIILPLAFGKRQGREFIWNDLLSLETGSLKLANGRVIEKTLYNRRTRQDEPALFVALTFERREVLDSSNIKPMNLIGVDRGENIPAVIALTDPEGCPLSRFKDSLGNPTHILRIGESYKEKQRTIQAKKEVEQRRAGGYSRKYASKAKNLADDMVRNTARDLLYYAVTQDAMLIFENLSRGFGRQGKRTFMAERQYTRMEDWLTAKLAYEGLSKTYLSKTLAQYTSKTCSNCGFTITSADYDRVLEKLKKTATGWMTTINGKELKVEGQITYYNRYKRQNVVKDLSVELDRLSEESVNNDISSWTKGRSGEALSLLKKRFSHRPVQEKFVCLNCGFETHADEQAALNIARSWLFLRSQEYKKYQTNKTTGNTDKRAFVETWQSFYRKKLKEVWKPAV

SEQ ID NO: 342 - protein, 977 aa, Artificial Sequence
  CasX variant
QEIKRINKIRRRLVKDSNTKKAGKTGPMKTLLVRVMTPDLRERLENLRKKPENIPQPISNTSRANLNKLLTDYTEMKKAILHVYWEEFQKDPVGLMSRVAQPASKKIDQNKLKPEMDEKGNLTTAGFACSQCGQPLFVYKLEQVSEKGKAYTNYFGRCNVAEHEKLILLAQLKPEKDSDEAVTYSLGKFGQRALDFYSIHVTRESNHPVKPLEQIGGNSCASGPVGKALSDACMGAVASFLTKYQDIILEHQKVIKKNEKRLANLKDIASANGLAFPKITLPPQPHTKEGIEAYNNVVAQIVIWVNLNLWQKLKIGRDEAKPLQRLKGFPSFPLVERQANEVDWWDMVCNVKKLINEKKEDGKVFWQNLAGYKRQEALRPYLSSEEDRKKGKKFARYQLGDLLLHLEKKHGEDWGKVYDEAWERIDKKVEGLSKHIKLEEERRSEDAQSKAALTDWLRAKASFVIEGLKEADKDEFCRCELKLQKWYGDLRGKPFAIEAENSILDISGFSKQYNCAFIWQKDGVKKLNLYLIINYFKGGKLRFKKIKPEAFEANRFYTVINKKSGEIVPMEVNFNFDDPNLIILPLAFGKRQGREFIWNDLLSLETGSLKLANGRVIEKTLYNRRTRQDEPALFVALTFERREVLDSSNIKPMNLIGVDRGENIPAVIALTDPEGCPLSRFKDSLGNPTHILRIGESYKEKQRTIQAKKEVEQRRAGGYSRKYASKAKNLADDMVRNTARDLLYYAVTQDAMLIFENLSRGFGRQGKRTFMAERQYTRMEDWLTAKLAYEGLSKTYLSKTLAQYTSKTCSNCGFTITSADYDRVLEKLKKTATGWMTTINGKELKVEGQITYYNRYKRQNVVKDLSVELDRLSEESVNNDISSWTKGRSGEALSLLKKRFSHRPVQEKFVCLNCGFETHADEQAALNIARSWLFLRSQEYKKYQTNKTTGNTDKRAFVETWQSFYRKKLKEVWKPAV

SEQ ID NO: 343 - protein, 977 aa, Artificial Sequence; identical to SEQ ID NO: 333
  CasX variant

SEQ ID NO: 344 - protein, 976 aa, Artificial Sequence; identical to SEQ ID NO: 334
  CasX variant

SEQ ID NO: 345 - protein, 976 aa, Artificial Sequence; identical to SEQ ID NO: 335
  CasX variant

SEQ ID NO: 346 - protein, 976 aa, Artificial Sequence
  CasX variant
QEIKRINKIRRRLVKDSNTKKAGKTGPMKTLLVRVMTPDLRERLENLRKKPENIPQPISNTSRANLNKLLTDYTEMKKAILHVYWEEFQKDPVGLMSRVAQPAPKNIDQRKLIPVKDGNERLTSSGFACSQCCQPLYVYKLEQVNDKGKPHTNYFGRCNVSEHERLILLSPHKPEANDELVTYSLGKFGQRALDFYSIHVTKESTHPVKPLAQIAGNRYASGPVGKALSDACMGTIASFLSKYQDIIIEHQKVVKGNQKRLESLRELAGKENLEYPSVTLPPQPHTKEGVDAYNEVIARVRMWVNLNLWQKLKLSRDDAKPLLRLKGFPSFPLVERQANEVDWWDMVCNVKKLINEKKEDGKVFWQNLAGYKRQEALRPYLSSEEDRKKGKKFARYQLGDLLKHLEKKHGEDWGKVYDEAWERIDKKVEGLSKHIKLEEERRSEDAQSKAALTDWLRAKASFVIEGLKEADKDEFCRCELKLQKWYGDLRGKPFAIEAENSILDISGFSKQYNCAFIWQKDGVKKLNLYLIINYFKGGKLRFKKIKPEAFEANRFYTVINKKSGEIVPMEVNFNFDDPNLIILPLAFGKRQGREFIWNDLLSLETGSLKLANGRVIEKTLYNRRTRQDEPALFVALTFERREVLDSSNIKPMNLIGVDRGENIPAVIALTDPEGCPLSRFKDSLGNPTHILRIGESYKEKQRTIQAKKEVEQRRAGGYSRKYASKAKNLADDMVRNTARDLLYYAVTQDAMLIFENLSRGFGRQGKRTFMAERQYTRMEDWLTAKLAYEGLSKTYLSKTLAQYTSKTCSNCGFTITSADYDRVLEKLKKTATGWMTTINGKELKVEGQITYYNRRKRQNVVKDLSVELDRLSEESVNNDISSWTKGRSGEALSLLKKRFSHRPVQEKFVCLNCGFETHADEQAALNIARSWLFLRSQEYKKYQTNKTTGNTDKRAFVETWQSFYRKKLKEVWKPAV

SEQ ID NO: 347 - protein, 976 aa, Artificial Sequence; identical to SEQ ID NO: 337
  CasX variant

SEQ ID NO: 348 - protein, 977 aa, Artificial Sequence; identical to SEQ ID NO: 338
  CasX variant

SEQ ID NO: 349 - protein, 977 aa, Artificial Sequence; identical to SEQ ID NO: 339
  CasX variant

SEQ ID NO: 350 - protein, 977 aa, Artificial Sequence; identical to SEQ ID NO: 340
  CasX variant

SEQ ID NO: 351 - protein, 977 aa, Artificial Sequence; identical to SEQ ID NO: 341
  CasX variant

SEQ ID NO: 352 - protein, 977 aa, Artificial Sequence; identical to SEQ ID NO: 342
  CasX variant

SEQ ID NO: 353 - RNA, 21 nt, Artificial Sequence
  scaffold stem loop
ccagcgacuaugucguagugg

SEQ ID NO: 354 - RNA, 19 nt, Unknown
  exogenous stem loop region
acaugaggauuacccaugu

SEQ ID NO: 355 - RNA, 18 nt, Unknown
  exogenous stem loop region
ugcaugucuaagacagca

SEQ ID NO: 356 - RNA, 20 nt, Unknown
  exogenous stem loop region
aauccauugcacuccggauu

SEQ ID NO: 357 - RNA, 12 nt, Unknown
  exogenous stem loop region
ccucuucggagg

SEQ ID NO: 358 - RNA, 21 nt, Unknown
  exogenous stem loop region
aggaguuucuauggaaacccu

SEQ ID NO: 359 - RNA, 30 nt, Unknown
  exogenous stem loop region
aggugggacgaccucucggucguccuaucu

SEQ ID NO: 360 - RNA, 19 nt, Unknown
  exogenous stem loop region
ugcucgcuccguucgagca

SEQ ID NO: 361 - RNA, 21 nt, Unknown
  exogenous stem loop region
ugcucgacgcguccucgagca

SEQ ID NO: 362 - RNA, 22 nt, Unknown
  exogenous stem loop region
ugcucguuugcggcuacgagca

SEQ ID NO: 363 - RNA, 17 nt, Unknown
  exogenous stem loop region
agggagggagggagagg

SEQ ID NO: 364 - RNA, 19 nt, Unknown
  exogenous stem loop region
gguuaggguuaggguuagg

SEQ ID NO: 365 - RNA, 25 nt, Unknown
  exogenous stem loop region
cugcucaguacgagaggaaccgcag

SEQ ID NO: 366 - RNA, 78 nt, Unknown
  exogenous stem loop region
uacacugggaucgcugaauuagagaucggcguccuuucauucuauauacuuuggaguuuuaaaaugucucuaaguaca

SEQ ID NO: 367 - DNA, 108 bp, Artificial Sequence
  scaffold variant
tactggcgcttttatctcattactttcgagagccatcaccagcgactatgtcgtatgggtaaagcgcttatttatcgagagaaatccgataaataagaagcatcaaag

SEQ ID NO: 368 - DNA, 110 bp, Artificial Sequence
  scaffold variant
tactggcgcttttatctcattactttcgagagccatcaccagcgactatgtcgtatgggtaaagcgcttatttatccggagagaaatccgataaataagaagcatcaaag

SEQ ID NO: 369 - DNA, 108 bp, Artificial Sequence
  scaffold variant
cctggcgcttttatctcattactttcgagagccatcaccagcgactatgtcgtatgggtaaagcgcttatttatcggagagaaatccgataaataagaagcatcaaag

SEQ ID NO: 370 - DNA, 108 bp, Artificial Sequence
  scaffold variant
cctggcgcttttatctcattactttgagagccatcaccagcgactatgtcgtagtgggtaaagcgcttatttatcggagagaaatccgataaataagaagcatcaaag

SEQ ID NO: 371 - DNA, 106 bp, Artificial Sequence
  scaffold variant
cctggcgcttttatctcattactttgagagccatcaccagcgactatgtcgtatgggtaaagcgcttatttatcaagagaaatccgataaataagaagcatcaaag

SEQ ID NO: 372 - DNA, 108 bp, Artificial Sequence
  scaffold variant
cctggcgcttttatctcattactttgagagccatcaccagcgactatgtcgtattgggtaaagcgcttatttatcggagagaaatccgataaataagaagcatcaaag

SEQ ID NO: 373 - DNA, 108 bp, Artificial Sequence
  scaffold variant
tactggcgcttttatctcattactttcgagagccatcaccagcgactatgtcgtatgggtaaagcgcttatttatcggagagaaatcgataaataagaagcatcaaag

SEQ ID NO: 374 - DNA, 108 bp, Artificial Sequence
  scaffold variant
cctggcgcttttatctcattactttgagagccatcaccagcgactatgtcgtatgggtaaagcgcttatttatgcggagagaaatccgataaataagaagcatcaaag

SEQ ID NO: 375 - DNA, 108 bp, Artificial Sequence
  scaffold variant
cctggcgcttttatctcattactttgagagccatcaccagcgactatgtcgtatgggtaaagcgcttatttatctggagagaaatccgataaataagaagcatcaaag

SEQ ID NO: 376 - DNA, 108 bp, Artificial Sequence
  scaffold variant
cctggcgcttttatctcattactttgagagccatcaccagcgactatgtcgtatgggtaaagcgcttatttatcggagagaaatctcgataaataagaagcatcaaag

SEQ ID NO: 377 - DNA, 108 bp, Artificial Sequence
  scaffold variant
cctggcgcttttatctcattactttgagagccatcaccagcgactatgtcgtatgggtaaagcgcttatttatccggagagaaatccgataaataagaagcatcaaag

SEQ ID NO: 378 - DNA, 108 bp, Artificial Sequence
  scaffold variant
cctggcgcttttatctcattactttagagagccatcaccagcgactatgtcgtatgggtaaagcgcttatttatcggagagaaatccgataaataagaagcatcaaag

SEQ ID NO: 379 - DNA, 105 bp, Artificial Sequence
  scaffold variant
ctggcgcttttatctcattactttgagagccatcaccagcgactatgtcgtatgggtaaagcgcttatttatcgagagaaatccgataaataagaagcatcaaag

SEQ ID NO: 380 - DNA, 110 bp, Artificial Sequence
  scaffold variant
tactggcgcttttattctcattactttgagagccatcaccagcgactatgtcgtatgggtaaagcgcttatttattcggagagaaatccgataaataagaagcatcaaag

SEQ ID NO: 381 - DNA, 108 bp, Artificial Sequence
  scaffold variant
tactggcgcttttatctcattactttgtagagccatcaccagcgactatgtcgtatgggtaaagcgcttatttatctagagaaatccgataaataagaagcatcaaag

SEQ ID NO: 382 - DNA, 108 bp, Artificial Sequence
  scaffold variant
cctggcgcttttatctcattactttgagagccatcaccagcgactatgtcgtatgggtaaagcgcttatttatcggagagaaatcccgataaataagaagcatcaaag

SEQ ID NO: 383 - DNA, 108 bp, Artificial Sequence
  scaffold variant
tactggcgcttttatctcattactttcgagagccatcaccagcgactatgtcgtatgggtaaagcgcttatttattgagagaaatccgataaataagaagcatcaaag

SEQ ID NO: 384 - DNA, 107 bp, Artificial Sequence
  scaffold variant
ctggcgcttttatctcattactttgagagccatcaccagcgactatgtcgtagtgggtaaagcgcttatttatcggagagaaatccgataaataagaagcatcaaag

SEQ ID NO: 385 - DNA, 106 bp, Artificial Sequence
  scaffold variant
cctggcgcttttatctcattactttgagagccatcaccagcgactatgtcgtatgggtaaagcgcttatttatcgagagaaatccgataaataagaagcatcaaag

SEQ ID NO: 386 - DNA, 107 bp, Artificial Sequence
  scaffold variant
ctggcgcttttatctcattactttgagagccatcaccagcgactatgtcgtatgggtaaagcgcttatttatccggagagaaatccgataaataagaagcatcaaag

SEQ ID NO: 387 - DNA, 108 bp, Artificial Sequence
  scaffold variant
actggcgcttttatctcattactttgagagccatcaccagcgactatgtcgtagtgggtaaagcgcttatttatcggagagaaatccgataaataagaagcatcaaag

SEQ ID NO: 388 - DNA, 106 bp, Artificial Sequence
  scaffold variant
cctggcgcttttatctcattactttgagagccatcaccagcgactatgtcgtatgggtaaagcgcttatttatcggagataatccgataaataagaagcatcaaag

SEQ ID NO: 389 - DNA, 108 bp, Artificial Sequence
  scaffold variant
cctggcgcttttatctcattactttgagagccatcaccagcgactatgtcgtatgggtaaagcgcttatttatcggagagaaatcgcgataaataagaagcatcaaag

SEQ ID NO: 390 - DNA, 105 bp, Artificial Sequence
  scaffold variant
cctggcgcttttatctcattactttgagagccatcaccagcgactatgtcgtatgggtaaagcgcttatttatcggagaaatccgataaataagaagcatcaaag

SEQ ID NO: 391 - DNA, 110 bp, Artificial Sequence
  scaffold variant
tactggcgcttttatctcattactttcgagagccatcaccagcgactatgtcgtatgggtaaagcgcttatttatcaggagagaaatccgataaataagaagcatcaaag

SEQ ID NO: 392 - DNA, 110 bp, Artificial Sequence
  scaffold variant
tactggcgcttttattctcattactttgagagccatcaccagcgactatgtcgtatgggtaaagcgcttatttatgcggagagaaatccgataaataagaagcatcaaag

SEQ ID NO: 393 - DNA, 110 bp, Artificial Sequence
  scaffold variant
tactggcgcttttatctcattactttagagagccatcaccagcgactatgtcgtatgggtaaagcgcttatttatccggagagaaatccgataaataagaagcatcaaag

SEQ ID NO: 394 - DNA, 108 bp, Artificial Sequence
  scaffold variant
cctggcgcttttatctcattactttgagagccatcaccagcgactatgtcgtatgggtaaagcgcttatttatcggcagagaaatccgataaataagaagcatcaaag

SEQ ID NO: 395 - DNA, 108 bp, Artificial Sequence
  scaffold variant
actggcgcttttatctcattactttgagagccatcaccagcgactatgtcgtatgggtaaagcgcttatttatcggagagaaatcccgataaataagaagcatcaaag

SEQ ID NO: 396 - DNA, 106 bp, Artificial Sequence
  scaffold variant
actggcgcttttatctcattactttgagagccatcaccagcgactatgtcgtatgggtaaagcgcttatttatccagagaaatccgataaataagaagcatcaaag

SEQ ID NO: 397 - DNA, 110 bp, Artificial Sequence
  scaffold variant
tactggcgcttttatctcattactttcgagagccatcaccagcgactatgtcgtatgggtaaagcgcttatttatcgggagagaaatccgataaataagaagcatcaaag

SEQ ID NO: 398 - DNA, 108 bp, Artificial Sequence
  scaffold variant
tactggcgcttttatcttcattactttgagagccatcaccagcgactatgtcgtatgggtaaagcgcttatttatcaagagaaatccgataaataagaagcatcaaag

SEQ ID NO: 399 - DNA, 108 bp, Artificial Sequence
  scaffold variant
actggcgcttttatctcattactttgagagccatcaccagcgactatgtcgtatgggtaaagcgcttatttattcggagagaaatccgataaataagaagcatcaaag

SEQ ID NO: 400 - DNA, 106 bp, Artificial Sequence
  scaffold variant
cctggcgcttttatctcattactttgagagccatcaccagcgactatgtcgtatgggtaaagcgcttatttatcggagagaaaccgataaataagaagcatcaaag

SEQ ID NO: 401 - DNA, 106 bp, Artificial Sequence
  scaffold variant
actggcgcttttatctcattactttgagagccatcaccagcgactatgtcgtatgggtaaagcgcttatttatcgagagaaatccgataaataagaagcatcaaag

SEQ ID NO: 402 - DNA, 107 bp, Artificial Sequence
  scaffold variant
tactggcgcttttatctcattactttcgagagccatcaccagcgactatgtcgtatgggtaaagcgcttatttatcggagaaatccgataaataagaagcatcaaag

SEQ ID NO: 403 - DNA, 106 bp, Artificial Sequence
  scaffold variant
cctggcgcttttatctcattactttgagagccatcaccagcgactatgtcgtatgggtaaagcgcttatttatccagagaaatccgataaataagaagcatcaaag

SEQ ID NO: 404 - DNA, 108 bp, Artificial Sequence
  scaffold variant
cctggcgcttttatctcattactttgagagccatcaccagcgactatgtcgtatgggtaaagcgcttatttattcggagagaaatccgataaataagaagcatcaaag

SEQ ID NO: 405 - DNA, 108 bp, Artificial Sequence
  scaffold variant
cctggcgcttttatctcattactttgagagccatcaccagcgactatgtcgtatgggtaaagcgcttatttatcgggagagaaatccgataaataagaagcatcaaag

SEQ ID NO: 406 - DNA, 106 bp, Artificial Sequence
  scaffold variant
actggcgcttttatctcattactttgagagccatcaccagcgactatgtcgtatgggtaaagcgcttatttatcggagataatccgataaataagaagcatcaaag

SEQ ID NO: 407 - DNA, 108 bp, Artificial Sequence
  scaffold variant
actggcgcttttatctcattactttgagagccatcaccagcgactatgtcgtatgggtaaagcgcttatttatcggagagaaatccgcataaataagaagcatcaaag

SEQ ID NO: 408 - DNA, 105 bp, Artificial Sequence
  scaffold variant
ctggcgcttttatctcattactttgagagccatcaccagcgactatgtcgtatgggtaaagcgcttatttatcaagagaaatccgataaataagaagcatcaaag

SEQ ID NO: 409 - DNA, 106 bp, Artificial Sequence
  scaffold variant
actggcgcttttatctcattactttgagagccatcaccagcgactatgtcgtatgggtaaagcgcttatttatcaagagaaatccgataaataagaagcatcaaag

SEQ ID NO: 410 - DNA, 108 bp, Artificial Sequence
  scaffold variant
actggcgcttttatctcattactttgagagccatcaccagcgactatgtcgtatgggtaaagcgcttatttatccggagagaaatccgataaataagaagcatcaaag

SEQ ID NO: 411 - DNA, 106 bp, Artificial Sequence
  scaffold variant
tctggcgcttttatctcattactttgagagccatcaccagcgactatgtcgtatgggtaaagcgcttatttatcggagataatccgataaataagaagcatcaaag

SEQ ID NO: 412 - DNA, 108 bp, Artificial Sequence
  scaffold variant
tactggcgcttttatctcattactttcgagagccatcaccagcgactatgtcgtatgggtaaagcgcttatttatctagagaaatccgataaataagaagcatcaaag

SEQ ID NO: 413 - DNA, 110 bp, Artificial Sequence
  scaffold variant
tactggcgcttttattctcattactttgagagccatcaccagcgactatgtcgtatgggtaaagcgcttatttatccggagagaaatccgataaataagaagcatcaaag

SEQ ID NO: 414 - DNA, 110 bp, Artificial Sequence
  scaffold variant
tactggcgcttttatctcattactttcgagagccatcaccagcgactatgtcgtatgggtaaagcgcttatttattcggagagaaatccgataaataagaagcatcaaag

SEQ ID NO: 415 - DNA, 108 bp, Artificial Sequence
  scaffold variant
tacggcgcttttatctcattactttgagagccatcaccagcgactatgtcgtatgggtaaagcgcttatttatctggagagaaatccgataaataagaagcatcaaag

SEQ ID NO: 416 - DNA, 106 bp, Artificial Sequence
  scaffold variant
cctggcgcttttatctcattactttgagagccatcaccagcgactatgtcgtatgggtaaagcgcttattttcggagagaaatccgataaataagaagcatcaaag

SEQ ID NO: 417 - DNA, 108 bp, Artificial Sequence
  scaffold variant
tactggcgcttttatctcattactttcgagagccatcaccagcgactatgtcgtatgggtaaagcgcttatttatcgggagaaatccgataaataagaagcatcaaag

SEQ ID NO: 418 - DNA, 106 bp, Artificial Sequence
  scaffold variant
tacggcgcttttatctcattactttgagagccatcaccagcgactatgtcgtatgggtaaagcgcttatttatctagagaaatccgataaataagaagcatcaaag

SEQ ID NO: 419 - DNA, 108 bp, Artificial Sequence
  scaffold variant
tacggcgcttttatctcattactttgagagccatcaccagcgactatgtcgtatgggtaaagcgcttatttatcggagagaaatctcgataaataagaagcatcaaag

SEQ ID NO: 420 - DNA, 108 bp, Artificial Sequence
  scaffold variant
cctggcgcttttatctcattactttgagagccatcaccagcgactatgtcgtatgggtaaagcgcttatttactcggagagaaatccgataaataagaagcatcaaag

SEQ ID NO: 421 - DNA, 105 bp, Artificial Sequence
  scaffold variant
atggcgcttttatctcattactttgagagccatcaccagcgactatgtcgtatgggtaaagcgcttatttatcgagagaaatccgataaataagaagcatcaaag

SEQ ID NO: 422 - DNA, 108 bp, Artificial Sequence
  scaffold variant
tactggcgcttttatcttcattactttgagagccatcaccagcgactatgtcgtatgggtaaagcgcttatttatcgagagaaatccgataaataagaagcatcaaag

SEQ ID NO: 423 - DNA, 106 bp, Artificial Sequence
  scaffold variant
cctggcgcttttatctcattactttgagagccatcaccagcgactatgtcgtatgggtaaagcgcttatttatcgtgagaaatccgataaataagaagcatcaaag

SEQ ID NO: 424 - DNA, 108 bp, Artificial Sequence
  scaffold variant
actggcgcttttatctcattactttgagagccatcaccagcgactatgtcgtatgggtaaagcgcttatttatcggagagaaatctcgataaataagaagcatcaaag

SEQ ID NO: 425 - DNA, 106 bp, Artificial Sequence
  scaffold variant
cctggcgcttttatctcattactttgagagccatcaccagcgactatgtcgtatgggtaaagcgcttatttatcggagagaaatccataaataagaagcatcaaag

SEQ ID NO: 426 - DNA, 108 bp, Artificial Sequence
  scaffold variant
gctggcgcttttatctcattactttcgagagccatcaccagcgactatgtcgtatgggtaaagcgcttatttatcggagagaaatccgataaataagaagcatcaaag

SEQ ID NO: 427 - DNA, 121 bp, Artificial Sequence
  scaffold variant
tactggcgcttttatctcattactttgctcattactttgagagccatcaccagcgactatgtcgtatgggtaaagcgcttatttatgcggagagaaatccgataaataagaagcatcaaag

SEQ ID NO: 428 - DNA, 105 bp, Artificial Sequence
  scaffold variant
ctggcgcttttatctcattactttgagagccatcaccagcgactatgtcgtatgggtaaagcgcttatttatcgggagaaatccgataaataagaagcatcaaag

SEQ ID NO: 429 - DNA, 106 bp, Artificial Sequence
  scaffold variant
cctggcgcttttatctcattactttgagagccatcaccagcgactatgtcgtatgggtaaagcgcttatttatctagagaaatccgataaataagaagcatcaaag

SEQ ID NO: 430 - DNA, 106 bp, Artificial Sequence
  scaffold variant
actggcgcttttatctcattactttgagagccatcaccagcgactatgtcgtatgggtaaagcgcttatttattgagagaaatccgataaataagaagcatcaaag

SEQ ID NO: 431 - DNA, 106 bp, Artificial Sequence
  scaffold variant
actggcgcttttatctcattactttgagagccatcaccagcgactatgtcgtatgggtaaagcgcttatttatcggagagaaatcgataaataagaagcatcaaag

SEQ ID NO: 432 - DNA, 108 bp, Artificial Sequence
  scaffold variant
actggcgcttttatctcattactttgagagccatcaccagcgactatgtcgtatgggtaaagcgcttatttatcgcgagagaaatccgataaataagaagcatcaaag

SEQ ID NO: 433 - DNA, 108 bp, Artificial Sequence
  scaffold variant
actggcgcttttatctcattactttgagagccatcaccagcgactatgtcgtatgggtaaagcgcttattctatcggagagaaatccgataaataagaagcatcaaag

SEQ ID NO: 434 - DNA, 108 bp, Artificial Sequence
  scaffold variant
tctggcgcttttatctcattactttgagagccatcaccagcgactatgtcgtagtgggtaaagcgcttatttatcggagagaaatccgataaataagaagcatcaaag

SEQ ID NO: 435 - DNA, 108 bp, Artificial Sequence
  scaffold variant
tactggcgcttttatctcattactttgcagagccatcaccagcgactatgtcgtatgggtaaagcgcttatttatccagagaaatccgataaataagaagcatcaaag

SEQ ID NO: 436 - DNA, 106 bp, Artificial Sequence
  scaffold variant
cctggcgcttttatctcattactttgagagccatcaccagcgactatgtcgtatgggtaaagcgcttatttccggagagaaatccgataaataagaagcatcaaag

SEQ ID NO: 437 - DNA, 106 bp, Artificial Sequence
  scaffold variant
tctggcgcttttatctcattactttgagagccatcaccagcgactatgtcgtatgggtaaagcgcttatttatcaagagaaatccgataaataagaagcatcaaag

SEQ ID NO: 438 - DNA, 110 bp, Artificial Sequence
  scaffold variant
tactggcgcttttatcttcattactttgagagccatcaccagcgactatgtcgtatgggtaaagcgcttatttatcggcagagaaatccgataaataagaagcatcaaag

SEQ ID NO: 439 - DNA, 107 bp, Artificial Sequence
  scaffold variant
ctggcgcttttatctcattactttgagagccatcaccagcgactatgtcgtatgggtaaagcgcttatttatgcggagagaaatccgataaataagaagcatcaaag

SEQ ID NO: 440 - DNA, 108 bp, Artificial Sequence
  scaffold variant
tctggcgcttttatctcattactttagagagccatcaccagcgactatgtcgtatgggtaaagcgcttatttatcggagagaaatccgataaataagaagcatcaaag

SEQ ID NO: 441 - DNA, 110 bp, Artificial Sequence
  scaffold variant
tactggcgcttttattctcattactttgagagccatcaccagcgactatgtcgtatgggtaaagcgcttatttatcggagagaaataccgataaataagaagcatcaaag

SEQ ID NO: 442 - DNA, 108 bp, Artificial Sequence
  scaffold variant
tctggcgcttttatctcattactttgagagccatcaccagcgactatgtcgtatgggtaaagcgcttatttatgcggagagaaatccgataaataagaagcatcaaag

SEQ ID NO: 443 - DNA, 108 bp, Artificial Sequence
  scaffold variant
tactggcgcttttatctcattactttgtagagccatcaccagcgactatgtcgtatgggtaaagcgcttatttatcaagagaaatccgataaataagaagcatcaaag

SEQ ID NO: 444 - DNA, 106 bp, Artificial Sequence
  scaffold variant
tacggcgcttttatctcattactttgagagccatcaccagcgactatgtcgtatgggtaaagcgcttatttattgagagaaatccgataaataagaagcatcaaag

SEQ ID NO: 445 - DNA, 108 bp, Artificial Sequence
  scaffold variant
tacggcgcttttatctcattactttgagagccatcaccagcgactatgtcgtatgggtaaagcgcttatttatccggagagaaatccgataaataagaagcatcaaag

SEQ ID NO: 446 - DNA, 108 bp, Artificial Sequence
  scaffold variant
cctggcgcttttatctcattactttgagagccatcaccagcgactatgtcgtatgggtaaagcgcttatttatcggagagaaatcctgataaataagaagcatcaaag

SEQ ID NO: 447 - DNA, 108 bp, Artificial Sequence
  scaffold variant
actggcgcttttatctcattactttgagagccatcaccagcgactatgtcgtatgggtaaagcgcttatttatacggagagaaatccgataaataagaagcatcaaag

SEQ ID NO: 448 - DNA, 107 bp, Artificial Sequence
  scaffold variant
atggcgcttttatctcattactttgagagccatcaccagcgactatgtcgtatgggtaaagcgcttatttatgcggagagaaatccgataaataagaagcatcaaag

SEQ ID NO: 449 - DNA, 108 bp, Artificial Sequence
  scaffold variant
tctggcgcttttatctcattactttgcagagccatcaccagcgactatgtcgtatgggtaaagcgcttatttatcggagagaaatccgataaataagaagcatcaaag

SEQ ID NO: 450 - DNA, 107 bp, Artificial Sequence; identical to SEQ ID NO: 386
  scaffold variant

SEQ ID NO: 451 - DNA, 108 bp, Artificial Sequence
  scaffold variant
gctggcgcttttatctcattactttgagagccatcaccagcgactatgtcgtagtgggtaaagcgcttatttatcggagagaaatccgataaataagaagcatcaaag

SEQ ID NO: 452 - DNA, 110 bp, Artificial Sequence
  scaffold variant
tactggcgcttttattctcattactttgagagccatcaccagcgactatgtcgtatgggtaaagcgcttatttactcggagagaaatccgataaataagaagcatcaaag

SEQ ID NO: 453 - DNA, 110 bp, Artificial Sequence
  scaffold variant
tactggcgcttttatctctattactttgagagccatcaccagcgactatgtcgtatgggtaaagcgcttatttatgcggagagaaatccgataaataagaagcatcaaag

SEQ ID NO: 454 - DNA, 108 bp, Artificial Sequence
  scaffold variant
tacggcgcttttatctcattactttgagagccatcaccagcgactatgtcgtatgggtaaagcgcttatttatcggagagaaatcgcgataaataagaagcatcaaag

SEQ ID NO: 455 - DNA, 105 bp, Artificial Sequence
  scaffold variant
atggcgcttttatctcattactttgagagccatcaccagcgactatgtcgtatgggtaaagcgcttatttatcgggagaaatccgataaataagaagcatcaaag

SEQ ID NO: 456 - DNA, 108 bp, Artificial Sequence
  scaffold variant
cctggcgcttttatctcattactttgagagccatcaccagcgactatgtcgtatgggtaaagcgcttatttatcggagagaaatccgcataaataagaagcatcaaag

SEQ ID NO: 457 - DNA, 108 bp, Artificial Sequence
  scaffold variant
cctggcgcttttatctcattactttgagagccatcaccagcgactatgtcgtatgggtaaagcgcttatttatcggagagaaatccgaataaataagaagcatcaaag

SEQ ID NO: 458 - DNA, 110 bp, Artificial Sequence
  scaffold variant
tactggcgcttttattctcattactttgagagccatcaccagcgactatgtcgtatgggtaaagcgcttatttagtcggagagaaatccgataaataagaagcatcaaag

SEQ ID NO: 459 - DNA, 106 bp, Artificial Sequence
  scaffold variant
tctggcgcttttatctcattactttgagagccatcaccagcgactatgtcgtatgggtaaagcgcttatttatcgagagaaatccgataaataagaagcatcaaag

SEQ ID NO: 460 - DNA, 108 bp, Artificial Sequence
  scaffold variant
tactggcgcttttatcttcattactttgagagccatcaccagcgactatgtcgtatgggtaaagcgcttatttatctagagaaatccgataaataagaagcatcaaag

SEQ ID NO: 461 - DNA, 108 bp, Artificial Sequence
  scaffold variant
actggcgcttttatctcattactttgagagccatcaccagcgactatgtcgtatgggtaaagcgcttatttatcgtgagagaaatccgataaataagaagcatcaaag

SEQ ID NO: 462 - DNA, 108 bp, Artificial Sequence
  scaffold variant
cctggcgcttttatctcattactttgagagccatcaccagcgactatgtcgtatgggtaaagcgcttatttatcggagagaaatccgtataaataagaagcatcaaag

SEQ ID NO: 463 - DNA, 106 bp, Artificial Sequence
  scaffold variant
cctggcgcttttatctcattactttgagagccatcaccagcgactatgtcgtatgggtaaagcgcttatttattgagagaaatccgataaataagaagcatcaaag

SEQ ID NO: 464 - DNA, 108 bp, Artificial Sequence
  scaffold variant
cctggcgcttttatctcattactttgagagccatcaccagcgactatgtcgtatgggtaaagcgcttatttatcggagagaaataccgataaataagaagcatcaaag

SEQ ID NO: 465 - DNA, 108 bp, Artificial Sequence
  scaffold variant
tctggcgcttttatctcattactttcgagagccatcaccagcgactatgtcgtatgggtaaagcgcttatttatcggagagaaatccgataaataagaagcatcaaag

SEQ ID NO: 466 - DNA, 108 bp, Artificial Sequence
  scaffold variant
cctggcgcttttatcttcattactttgagagccatcaccagcgactatgtcgtatgggtaaagcgcttatttatcggagagaaatccgataaataagaagcatcaaag

SEQ ID NO: 467 - DNA, 107 bp, Artificial Sequence
  scaffold variant
ctggcgcttttatctcattactttgagagccatcaccagcgactatgtcgtatgggtaaagcgcttatttatctggagagaaatccgataaataagaagcatcaaag

SEQ ID NO: 468 - DNA, 108 bp, Artificial Sequence
  scaffold variant
actggcgcttttatctcattactttgagagccatcaccagcgactatgtcgtatgggtaaagcgcttatttatcggcagagaaatccgataaataagaagcatcaaag

SEQ ID NO: 469 - DNA, 106 bp, Artificial Sequence
  scaffold variant
cctggcgcttttatctcattactttgagagccatcaccagcgactatgtcgtatgggtaaagcgcttatttatcggaggaaatccgataaataagaagcatcaaag

SEQ ID NO: 470 - DNA, 106 bp, Artificial Sequence
  scaffold variant
cctggcgcttttatctcattactttgagagccatcaccagcgactatgtcgtatgggtaaagcgcttatttatcggagagaaatccgtaaataagaagcatcaaag

SEQ ID NO: 471 - DNA, 108 bp, Artificial Sequence
  scaffold variant
tctggcgcttttatctcattactttgagagccatcaccagcgactatgtcgtatgggtaaagcgcttatttatcggagagaaatcacgataaataagaagcatcaaag

SEQ ID NO: 472 - DNA, 108 bp, Artificial Sequence
  scaffold variant
tacggcgcttttatctcattactttgagagccatcaccagcgactatgtcgtatgggtaaagcgcttatttatcggagagaaatcctgataaataagaagcatcaaag

SEQ ID NO: 473 - DNA, 108 bp, Artificial Sequence
  scaffold variant
actggcgcttttatctcattactttgagagccatcaccagcgactatgtcgtatgggtaaagcgcttatttatgcggagagaaatccgataaataagaagcatcaaag

SEQ ID NO: 474 - DNA, 108 bp, Artificial Sequence
  scaffold variant
cctggcgcttttatctcattactttgagagccatcaccagcgactatgtcgtatgggtaaagcgcttatttagtcggagagaaatccgataaataagaagcatcaaag

SEQ ID NO: 475 - DNA, 107 bp, Artificial Sequence
  scaffold variant
ctggcgcttttatctcattactttgagagccatcaccagcgactatgtcgtatgggtaaagcgcttatttatcggagagaaatcccgataaataagaagcatcaaag

SEQ ID NO: 476 - DNA, 110 bp, Artificial Sequence
  scaffold variant
tactggcgcttttatcttcattactttgagagccatcaccagcgactatgtcgtatgggtaaagcgcttatttattcggagagaaatccgataaataagaagcatcaaag

SEQ ID NO: 477 - DNA, 110 bp, Artificial Sequence
  scaffold variant
tactggcgcttttatctctattactttgagagccatcaccagcgactatgtcgtatgggtaaagcgcttatttatcggagagaaatcgcgataaataagaagcatcaaag

SEQ ID NO: 478 - DNA, 105 bp, Artificial Sequence
  scaffold variant
ctggcgcttttatctcattactttgagagccatcaccagcgactatgtcgtatgggtaaagcgcttatttatctagagaaatccgataaataagaagcatcaaag

SEQ ID NO: 479 - DNA, 110 bp, Artificial Sequence
  scaffold variant
tactggcgcttttatctcattactttcgagagccatcaccagcgactatgtcgtatgggtaaagcgcttatttatcggagagaaatcccgataaataagaagcatcaaag

SEQ ID NO: 480 - DNA, 108 bp, Artificial Sequence
  scaffold variant
tactggcgcttttatctcattactttcgagagccatcaccagcgactatgtcgtatgggtaaagcgcttatttccggagagaaatccgataaataagaagcatcaaag

SEQ ID NO: 481 - DNA, 108 bp, Artificial Sequence
  scaffold variant
actggcgcttttatctcattactttgagagccatcaccagcgactatgtcgtatgggtaaagcgcttatttatcggagagaaatcacgataaataagaagcatcaaag

SEQ ID NO: 482 - DNA, 108 bp, Artificial Sequence
  scaffold variant
cctggcgcttttatctcattactttgagagccatcaccagcgactatgtcgtatgggtaaagcgcttatttatcgtgagagaaatccgataaataagaagcatcaaag

SEQ ID NO: 483 - DNA, 107 bp, Artificial Sequence
  scaffold variant
ctggcgcttttatctcattactttgagagccatcaccagcgactatgtcgtatgggtaaagcgcttatttatcggagagaaatcgcgataaataagaagcatcaaag

SEQ ID NO: 484 - DNA, 106 bp, Artificial Sequence
  scaffold variant
tacggcgcttttatctcattactttgagagccatcaccagcgactatgtcgtatgggtaaagcgcttatttatcgggagaaatccgataaataagaagcatcaaag

SEQ ID NO: 485 - DNA, 110 bp, Artificial Sequence
  scaffold variant
tactggcgcttttatcttcattactttgagagccatcaccagcgactatgtcgtatgggtaaagcgcttatttatgcggagagaaatccgataaataagaagcatcaaag

SEQ ID NO: 486 - DNA, 108 bp, Artificial Sequence
  scaffold variant
tctggcgcttttatctcattactttgagagccatcaccagcgactatgtcgtatgggtaaagcgcttatttatcggagagaaatcgcgataaataagaagcatcaaag

SEQ ID NO: 487 - DNA, 106 bp, Artificial Sequence
  scaffold variant
tctggcgcttttatctcattactttgagagccatcaccagcgactatgtcgtatgggtaaagcgcttatttatctagagaaatccgataaataagaagcatcaaag

SEQ ID NO: 488 - DNA, 110 bp, Artificial Sequence
  scaffold variant
tactggcgcttttatcctcattactttgagagccatcaccagcgactatgtcgtatgggtaaagcgcttatttatgcggagagaaatccgataaataagaagcatcaaag

SEQ ID NO: 489 - DNA, 106 bp, Artificial Sequence
  scaffold variant
tacggcgcttttatctcattactttgagagccatcaccagcgactatgtcgtatgggtaaagcgcttatttatcggagagaaatcgataaataagaagcatcaaag

SEQ ID NO: 490 - DNA, 108 bp, Artificial Sequence
  scaffold variant
tctggcgcttttatctcattactttgagagccatcaccagcgactatgtcgtatgggtaaagcgcttatttattcggagagaaatccgataaataagaagcatcaaag

SEQ ID NO: 491 - DNA, 106 bp, Artificial Sequence
  scaffold variant
tctggcgcttttatctcattactttgagagccatcaccagcgactatgtcgtatgggtaaagcgcttatttatcggagagaaatcgataaataagaagcatcaaag

SEQ ID NO: 492 - DNA, 107 bp, Artificial Sequence
  scaffold variant
tcggcgcttttatctcattactttgagagccatcaccagcgactatgtcgtatgggtaaagcgcttatttatcggagagaaatcccgataaataagaagcatcaaag

SEQ ID NO: 493 - DNA, 108 bp, Artificial Sequence
  scaffold variant
actggcgcttttatctcattactttgagagccatcaccagcgactatgtcgtatgggtaaagcgcttatttatcggagagaaatcgcgataaataagaagcatcaaag

SEQ ID NO: 494 - DNA, 106 bp, Artificial Sequence
  scaffold variant
cctggcgcttttatctcattactttgagagccatcaccagcgactatgtcgtatgggtaaagcgcttatttacggagagaaatccgataaataagaagcatcaaag

SEQ ID NO: 495 - DNA, 110 bp, Artificial Sequence
  scaffold variant
tactggcgcttttattctcattactttgagagccatcaccagcgactatgtcgtatgggtaaagcgcttatttatcggagagaaatcacgataaataagaagcatcaaag

SEQ ID NO: 496 - DNA, 106 bp, Artificial Sequence
  scaffold variant
cctggcgcttttatctcattactttgagagccatcaccagcgactatgtcgtatgggtaaagcgcttatttatcggaagaaatccgataaataagaagcatcaaag

SEQ ID NO: 497 - DNA, 110 bp, Artificial Sequence
  scaffold variant
tactggcgcttttatctcattactttgagagccatcaccagcgactatgtcgtatgggtaaagcgcttatttatgcggagagaaatcccgataaataagaagcatcaaag

SEQ ID NO: 498 - DNA, 106 bp, Artificial Sequence
  scaffold variant
actggcgcttttatctcattactttgagagccatcaccagcgactatgtcgtatgggtaaagcgcttatttatctagagaaatccgataaataagaagcatcaaag

SEQ ID NO: 499 - DNA, 108 bp, Artificial Sequence
  scaffold variant
tacggcgcttttatctcattactttgagagccatcaccagcgactatgtcgtatgggtaaagcgcttatttatcggagagaaatcccgataaataagaagcatcaaag

SEQ ID NO: 500 - DNA, 110 bp, Artificial Sequence
  scaffold variant
tactggcgcttttattctcattactttgagagccatcaccagcgactatgtcgtatgggtaaagcgcttatttatcggagagaaatcgcgataaataagaagcatcaaag

SEQ ID NO: 501 - DNA, 108 bp, Artificial Sequence
  scaffold variant
tctggcgcttttatctcattactttgagagccatcaccagcgactatgtcgtatgggtaaagcgcttatttatcggagagaaatctcgataaataagaagcatcaaag

SEQ ID NO: 502 - DNA, 107 bp, Artificial Sequence
  scaffold variant
atggcgcttttatctcattactttgagagccatcaccagcgactatgtcgtatgggtaaagcgcttatttatcgggagagaaatccgataaataagaagcatcaaag

SEQ ID NO: 503 - DNA, 105 bp, Artificial Sequence
  scaffold variant
ctggcgcttttatctcattactttgagagccatcaccagcgactatgtcgtatgggtaaagcgcttatttattgagagaaatccgataaataagaagcatcaaag

SEQ ID NO: 504 - DNA, 110 bp, Artificial Sequence
  scaffold variant
tactggcgcttttattctcattactttgagagccatcaccagcgactatgtcgtatgggtaaagcgcttatttatacggagagaaatccgataaataagaagcatcaaag

SEQ ID NO: 505 - DNA, 110 bp, Artificial Sequence
  scaffold variant
tactggcgcttttatcttcattactttgagagccatcaccagcgactatgtcgtatgggtaaagcgcttatttatcggagagaaatctcgataaataagaagcatcaaag

SEQ ID NO: 506 - DNA, 105 bp, Artificial Sequence
  scaffold variant
ctggcgcttttatctcattactttgagagccatcaccagcgactatgtcgtatgggtaaagcgcttatttatcggaagaaatccgataaataagaagcatcaaag

SEQ ID NO: 507 - DNA, 107 bp, Artificial Sequence
  scaffold variant
ctggcgcttttatctcattactttgagagccatcaccagcgactatgtcgtatgggtaaagcgcttatttatcgggagagaaatccgataaataagaagcatcaaag

SEQ ID NO: 508 - DNA, 108 bp, Artificial Sequence
  scaffold variant
tactggcgcttttattctcattactttgagagccatcaccagcgactatgtcgtatgggtaaagcgcttatttatcaagagaaatccgataaataagaagcatcaaag

SEQ ID NO: 509 - DNA, 106 bp, Artificial Sequence
  scaffold variant
tggcgcttttatctcattactttgagagccatcaccagcgactatgtcgtatgggtaaagcgcttatttatgcggagagaaatccgataaataagaagcatcaaag

SEQ ID NO: 510 - DNA, 105 bp, Artificial Sequence
  scaffold variant
ctggcgcttttatctcattactttgagagccatcaccagcgactatgtcgtatgggtaaagcgcttatttatcggagagaaaccgataaataagaagcatcaaag

SEQ ID NO: 511 - DNA, 108 bp, Artificial Sequence
  scaffold variant
cctggcgcttttatctcattactttgagagccatcaccagcgactatgtcgtatgggtaaagcgcttatttatcggagagaaatcacgataaataagaagcatcaaag

SEQ ID NO: 512 - DNA, 105 bp, Artificial Sequence
  scaffold variant
tctggcgcttttatctcattactttgagagccatcaccagcgactatgtcgtatgggtaaagcgcttatttatcggagaaatccgataaataagaagcatcaaag

SEQ ID NO: 513 - DNA, 108 bp, Artificial Sequence
  scaffold variant
tacggcgcttttatctcattactttgagagccatcaccagcgactatgtcgtatgggtaaagcgcttatttatcggagagaaatccgaataaataagaagcatcaaag

SEQ ID NO: 514 - DNA, 108 bp, Artificial Sequence
  scaffold variant
cctggcgcttttatctcattactttgagagccatcaccagcgactatgtcgtatgggtaaagcgcttatttatcggagagaaatccgataaataagagagcatcaaag

SEQ ID NO: 515 - DNA, 107 bp, Artificial Sequence
  scaffold variant
ctggcgcttttatctcattactttgagagccatcaccagcgactatgtcgtatgggtaaagcgcttatttagtcggagagaaatccgataaataagaagcatcaaag

SEQ ID NO: 516 - DNA, 108 bp, Artificial Sequence
  scaffold variant
tctggcgcttttatctcattactttgagagccatcaccagcgactatgtcgtatgggtaaagcgcttatttatacggagagaaatccgataaataagaagcatcaaag

SEQ ID NO: 517 - DNA, 107 bp, Artificial Sequence
  scaffold variant
ctggcgcttttatctcattactttgagagccatcaccagcgactatgtcgtatgggtaaagcgcttatttaatcggagagaaatccgataaataagaagcatcaaag

SEQ ID NO: 518 - DNA, 109 bp, Artificial Sequence
  scaffold variant
tactggcgcttttatctcattactttgagagccatcaccagcgactatgtcgtatgggtaaagcgcttatttatcggagagaaatcgcgataaataagaagcatcaaag

SEQ ID NO: 519 - DNA, 108 bp, Artificial Sequence
  scaffold variant
tacggcgcttttatctcattactttgagagccatcaccagcgactatgtcgtatgggtaaagcgcttatttatcggcagagaaatccgataaataagaagcatcaaag

SEQ ID NO: 520 - DNA, 108 bp, Artificial Sequence
  scaffold variant
tactggcgcttttattctcattactttgagagccatcaccagcgactatgtcgtatgggtaaagcgcttattttcggagagaaatccgataaataagaagcatcaaag

SEQ ID NO: 521 - DNA, 108 bp, Artificial Sequence
  scaffold variant
tactggcgcttttattctcattactttgagagccatcaccagcgactatgtcgtatgggtaaagcgcttatttatctagagaaatccgataaataagaagcatcaaag

SEQ ID NO: 522 - DNA, 106 bp, Artificial Sequence
  scaffold variant
cctggcgcttttatctcattactttgagagccatcaccagcgactatgtcgtatgggtaaagcgcttatttatcggagagtatccgataaataagaagcatcaaag

SEQ ID NO: 523 - DNA, 107 bp, Artificial Sequence; identical to SEQ ID NO: 439
  scaffold variant

SEQ ID NO: 524 - DNA, 105 bp, Artificial Sequence
  scaffold variant
ctggcgcttttatctcattactttgagagccatcaccagcgactatgtcgtatgggtaaagcgcttatttatcggagagaaatccataaataagaagcatcaaag

SEQ ID NO: 525 - DNA, 106 bp, Artificial Sequence
  scaffold variant
tacggcgcttttatctcattactttgagagccatcaccagcgactatgtcgtatgggtaaagcgcttatttatcgagagaaatccgataaataagaagcatcaaag

SEQ ID NO: 526 - DNA, 108 bp, Artificial Sequence
  scaffold variant
tctggcgcttttatctcattactttgagagccatcaccagcgactatgtcgtatgggtaaagcgcttatttatcggagagaaatccgaataaataagaagcatcaaag

SEQ ID NO: 527 - DNA, 108 bp, Artificial Sequence
  scaffold variant
tctggcgcttttatctcattactttgagagccatcaccagcgactatgtcgtatgggtaaagcgcttatttatcggagagaaatccgtataaataagaagcatcaaag

SEQ ID NO: 528 - DNA, 110 bp, Artificial Sequence
  scaffold variant
tactggcgcttttatcttcattactttgagagccatcaccagcgactatgtcgtatgggtaaagcgcttatttatcggagagaaatcccgataaataagaagcatcaaag

SEQ ID NO: 529 - DNA, 108 bp, Artificial Sequence
  scaffold variant
cctggcgcttttatctcattactttgagagccatcaccagcgactatgtcgtatgggtaaagcgcttatttatcgcgagagaaatccgataaataagaagcatcaaag

SEQ ID NO: 530 - DNA, 106 bp, Artificial Sequence
  scaffold variant
cctggcgcttttatctcattactttgagagccatcaccagcgactatgtcgtatgggtaaagcgcttatttatcgcgagaaatccgataaataagaagcatcaaag

SEQ ID NO: 531 - DNA, 107 bp, Artificial Sequence
  scaffold variant
cctggcgcttttatctcattactttgagagccatcaccagcgactatgtcgtatgggtaaagcgcttatttatcggtgagaaatccgataaataagaagcatcaaag

SEQ ID NO: 532 - DNA, 106 bp, Artificial Sequence
  scaffold variant
tacggcgcttttatctcattactttgagagccatcaccagcgactatgtcgtatgggtaaagcgcttatttatccagagaaatccgataaataagaagcatcaaag

SEQ ID NO: 533 - DNA, 107 bp, Artificial Sequence
  scaffold variant
ctggcgcttttatctcattactttgagagccatcaccagcgactatgtcgtatgggtaaagcgcttatttatcgagagagaaatccgataaataagaagcatcaaag

SEQ ID NO: 534 - DNA, 105 bp, Artificial Sequence; identical to SEQ ID NO: 379
  scaffold variant

SEQ ID NO: 535 - DNA, 108 bp, Artificial Sequence
  scaffold variant
cctggcgcttttatctcattactttgagagccatcaccagcgactatgtcgtatgggtaaagcgcttatttatacggagagaaatccgataaataagaagcatcaaag

SEQ ID NO: 536 - DNA, 106 bp, Artificial Sequence
  scaffold variant
actggcgcttttatctcattactttgagagccatcaccagcgactatgtcgtatgggtaaagcgcttatttatcggagagaaatccataaataagaagcatcaaag

SEQ ID NO: 537 - DNA, 107 bp, Artificial Sequence
  scaffold variant
cctggcgcttttatctcattactttgagagccatcaccagcgactatgtcgtatgggtaaagcgcttatttgtcggagagaaatccgataaataagaagcatcaaag

SEQ ID NO: 538 - DNA, 110 bp, Artificial Sequence
  scaffold variant
tactggcgcttttatctcattactttcgagagccatcaccagcgactatgtcgtatgggtaaagcgcttatttatcggcagagaaatccgataaataagaagcatcaaag

SEQ ID NO: 539 - DNA, 105 bp, Artificial Sequence
  scaffold variant
cctggcgcttttatctcattactttgagagccatcaccagcgactatgtcgtatgggtaaagcgtatttatcggagagaaatccgataaataagaagcatcaaag

SEQ ID NO: 540 - DNA, 104 bp, Artificial Sequence
  scaffold variant
tggcgcttttatctcattactttgagagccatcaccagcgactatgtcgtatgggtaaagcgcttatttatcgggagaaatccgataaataagaagcatcaaag

SEQ ID NO: 541 - DNA, 108 bp, Artificial Sequence
  scaffold variant
cctggcgcttttattctcattactttgagagccatcaccagcgactatgtcgtatgggtaaagcgcttatttatcggagagaaatccgataaataagaagcatcaaag

SEQ ID NO: 542 - DNA, 106 bp, Artificial Sequence
  scaffold variant
cctggcgcttttatctcattactttgagagccatcaccagcgactatgtcgtatgggtaaagcgcttatttatcggagagattccgataaataagaagcatcaaag

SEQ ID NO: 543 - DNA, 107 bp, Artificial Sequence
  scaffold variant
ctggcgcttttatctcattactttgagagccatcaccagcgactatgtcgtatgggtaaagcgcttatttatcggagagaaataccgataaataagaagcatcaaag

SEQ ID NO: 544 - DNA, 106 bp, Artificial Sequence
  scaffold variant
tacggcgcttttatctcattactttgagagccatcaccagcgactatgtcgtatgggtaaagcgcttatttatcgtgagaaatccgataaataagaagcatcaaag

SEQ ID NO: 545 - DNA, 105 bp, Artificial Sequence
  scaffold variant
ctggcgcttttatctcattactttgagagccatcaccagcgactatgtcgtatgggtaaagcgcttatttatcggagagaaatcgataaataagaagcatcaaag

SEQ ID NO: 546 - DNA, 106 bp, Artificial Sequence
  scaffold variant
cctggcgcttttatctcattactttgagagccatcaccagcgactatgtcgtatgggtaaagcgcttatttatcggagagaaatcgataaataagaagcatcaaag

SEQ ID NO: 547 - DNA, 106 bp, Artificial Sequence
  scaffold variant
actggcgcttttatctcattactttgagagccatcaccagcgactatgtcgtatgggtaaagcgcttatttatcggagagaaatccgtaaataagaagcatcaaag

SEQ ID NO: 548 - DNA, 108 bp, Artificial Sequence
  scaffold variant
tactggcgcttttatctcattactttcgagagccatcaccagcgactatgtcgtatgggtaaagcgcttatttatcggagagaatccgataaataagaagcatcaaag

SEQ ID NO: 549 - DNA, 110 bp, Artificial Sequence
  scaffold variant
tactggcgcttttattctcattactttgagagccatcaccagcgactatgtcgtatgggtaaagcgcttatttatctggagagaaatccgataaataagaagcatcaaag

SEQ ID NO: 550 - DNA, 108 bp, Artificial Sequence
  scaffold variant
tactggcgcttttatctcattactttagagagccatcaccagcgactatgtcgtatgggtaaagcgcttatttatcgagagaaatccgataaataagaagcatcaaag

SEQ ID NO: 551 - DNA, 110 bp, Artificial Sequence
  scaffold variant
tactggcgcttttattctcattactttgagagccatcaccagcgactatgtcgtatgggtaaagcgcttatttatcgggagagaaatccgataaataagaagcatcaaag

SEQ ID NO: 552 - DNA, 107 bp, Artificial Sequence
  scaffold variant
ctggcgcttttatctcattactttgagagccatcaccagcgactatgtcgtatgggtaaagcgcttatttatcggagagaaatcctgataaataagaagcatcaaag

SEQ ID NO: 553 - DNA, 108 bp, Artificial Sequence
  scaffold variant
tctggcgcttttatctcattactttgagagccatcaccagcgactatgtcgtatgggtaaagcgcttatttatcaggagagaaatccgataaataagaagcatcaaag

SEQ ID NO: 554 - DNA, 108 bp, Artificial Sequence
  scaffold variant
cctggcgcttttatctcattactttgcagagccatcaccagcgactatgtcgtatgggtaaagcgcttatttatcggagagaaatccgataaataagaagcatcaaag

SEQ ID NO: 555 - DNA, 105 bp, Artificial Sequence
  scaffold variant
tacggcgcttttatctcattactttgagagccatcaccagcgactatgtcgtatgggtaaagcgcttatttatcggagaaatccgataaataagaagcatcaaag

SEQ ID NO: 556 - DNA, 106 bp, Artificial Sequence
  scaffold variant
actggcgcttttatctcattactttgagagccatcaccagcgactatgtcgtatgggtaaagcgcttatttatcgcgagaaatccgataaataagaagcatcaaag

SEQ ID NO: 557 - DNA, 110 bp, Artificial Sequence
  scaffold variant
tactggcgcttttatcctcattactttgagagccatcaccagcgactatgtcgtatgggtaaagcgcttatttatcggagagaaatcacgataaataagaagcatcaaag

SEQ ID NO: 558 - DNA, 106 bp, Artificial Sequence
  scaffold variant
tacggcgcttttatctcattactttgagagccatcaccagcgactatgtcgtatgggtaaagcgcttatttgcggagagaaatccgataaataagaagcatcaaag

SEQ ID NO: 559 - DNA, 106 bp, Artificial Sequence
  scaffold variant
cctggcgcttttatctcattactttgagagccatcaccagcgactatgtcgtatgggtaaagcgcttatttatcggagacaatccgataaataagaagcatcaaag

SEQ ID NO: 560 - DNA, 106 bp, Artificial Sequence
  scaffold variant
actggcgcttttatctcattactttgagagccatcaccagcgactatgtcgtatgggtaaagcgcttatttatcggtagaaatccgataaataagaagcatcaaag

SEQ ID NO: 561 - DNA, 108 bp, Artificial Sequence
  scaffold variant
tctggcgcttttatctcattactttgagagccatcaccagcgactatgtcgtatgggtaaagcgcttatttatcgtgagagaaatccgataaataagaagcatcaaag

SEQ ID NO: 562 - DNA, 108 bp, Artificial Sequence
  scaffold variant
tacggcgcttttatctcattactttgagagccatcaccagcgactatgtcgtatgggtaaagcgcttatttatcgagagagaaatccgataaataagaagcatcaaag

SEQ ID NO: 563 - DNA, 107 bp, Artificial Sequence
  scaffold variant
ctggcgcttttatctcattactttgagagccatcaccagcgactatgtcgtatgggtaaagcgcttatttatcggagagaaatctcgataaataagaagcatcaaag

SEQ ID NO: 564 - DNA, 108 bp, Artificial Sequence
  scaffold variant
actggcgcttttatcttcattactttgagagccatcaccagcgactatgtcgtatgggtaaagcgcttatttatcggagagaaatccgataaataagaagcatcaaag

SEQ ID NO: 565 - DNA, 108 bp, Artificial Sequence
  scaffold variant
cctggcgcttttatctcattactttgagagccatcaccagcgactatgtcgtatgggtaaagcgcttatttatcggagagacaatccgataaataagaagcatcaaag

SEQ ID NO: 566 - DNA, 110 bp, Artificial Sequence
  scaffold variant
tactggcgcttttatcctcattactttgagagccatcaccagcgactatgtcgtatgggtaaagcgcttatttattcggagagaaatccgataaataagaagcatcaaag

SEQ ID NO: 567 - DNA, 106 bp, Artificial Sequence
  scaffold variant
cctggcgcttttatctcattactttgagagccatcaccagcgactatgtcgtatgggtaaagcgcttatttatcggacgaaatccgataaataagaagcatcaaag

SEQ ID NO: 568 - DNA, 106 bp, Artificial Sequence
  scaffold variant
gctggcgcttttatctcattactttgagagccatcaccagcgactatgtcgtatgggtaaagcgcttatttatctagagaaatccgataaataagaagcatcaaag

SEQ ID NO: 569 - DNA, 108 bp, Artificial Sequence
  scaffold variant
gctggcgcttttatctcattactttagagagccatcaccagcgactatgtcgtatgggtaaagcgcttatttatcggagagaaatccgataaataagaagcatcaaag

SEQ ID NO: 570 - DNA, 106 bp, Artificial Sequence
  scaffold variant
cctggcgcttttatctcattactttgagagccatcaccagcgactatgtcgtatgggtaaagcgcttatttgcggagagaaatccgataaataagaagcatcaaag

SEQ ID NO: 571 - DNA, 109 bp, Artificial Sequence
  scaffold variant
tactggcgcttttatctcattactttgagagccatcaccagcgactatgtcgtagtgggtaaagcgcttatttatcggagagaaatccgataaataagaagcatcaaag

SEQ ID NO: 572 - DNA, 108 bp, Artificial Sequence
  scaffold variant
tacggcgcttttatctcattactttgagagccatcaccagcgactatgtcgtatgggtaaagcgcttatttatcgggagagaaatccgataaataagaagcatcaaag

SEQ ID NO: 573 - DNA, 108 bp, Artificial Sequence
  scaffold variant
gctggcgcttttatctcattactttgagagccatcaccagcgactatgtcgtatgggtaaagcgcttatttatgcggagagaaatccgataaataagaagcatcaaag

SEQ ID NO: 574 - DNA, 108 bp, Artificial Sequence
  scaffold variant
actggcgcttttatctcattactttcgagagccatcaccagcgactatgtcgtatgggtaaagcgcttatttatcggagagaaatccgataaataagaagcatcaaag

SEQ ID NO: 575 - DNA, 108 bp, Artificial Sequence
  scaffold variant
tactggcgcttttatctcattactttgagagccatcaccagcgactatgtcgtattgggtaaagcgcttatttatcgagagaaatccgataaataagaagcatcaaag

SEQ ID NO: 576 - DNA, 108 bp, Artificial Sequence
  scaffold variant
actggcgcttttatctcattactttgagagccatcaccagcgactatgtcgtatgggtaaagcgcttatttatcgggagagaaatccgataaataagaagcatcaaag

SEQ ID NO: 577 - DNA, 108 bp, Artificial Sequence
  scaffold variant
tactggcgcttttatctcattactttagagagccatcaccagcgactatgtcgtatgggtaaagcgcttatttatcaagagaaatccgataaataagaagcatcaaag

SEQ ID NO: 578 - DNA, 107 bp, Artificial Sequence
  scaffold variant
ctggcgcttttatctcattactttgagagccatcaccagcgactatgtcgtatgggtaaagcgcttatttatacggagagaaatccgataaataagaagcatcaaag

SEQ ID NO: 579 - DNA, 108 bp, Artificial Sequence
  scaffold variant
tactggcgcttttatctcattactttcgagagccatcaccagcgactatgtcgtatgggtaaagcgcttatttacggagagaaatccgataaataagaagcatcaaag

SEQ ID NO: 580 - DNA, 105 bp, Artificial Sequence
  scaffold variant
actggcgcttttatctcattactttgagagccatcaccagcgactatgtcgtatgggtaaagcgcttatttatcggagaaatccgataaataagaagcatcaaag

SEQ ID NO: 581 - DNA, 108 bp, Artificial Sequence
  scaffold variant
tactggcgcttttatcttcattactttgagagccatcaccagcgactatgtcgtatgggtaaagcgcttatttatccagagaaatccgataaataagaagcatcaaag

SEQ ID NO: 582 - DNA, 106 bp, Artificial Sequence
  scaffold variant
tacggcgcttttatctcattactttgagagccatcaccagcgactatgtcgtatgggtaaagcgcttatttatcaagagaaatccgataaataagaagcatcaaag

SEQ ID NO: 583 - DNA, 108 bp, Artificial Sequence
  scaffold variant
tacggcgcttttatctcattactttgagagccatcaccagcgactatgtcgtatgggtaaagcgcttatttatcggagagaaatgccgataaataagaagcatcaaag

SEQ ID NO: 584 - DNA, 106 bp, Artificial Sequence
  scaffold variant
cctggcgcttttatctcattactttgagagccatcaccagcgactatgtcgtatgggtaaagcgcttatttatcggagagaaatccctaaataagaagcatcaaag

SEQ ID NO: 585 - DNA, 107 bp, Artificial Sequence; identical to SEQ ID NO: 439
  scaffold variant

SEQ ID NO: 586 - DNA, 106 bp, Artificial Sequence
  scaffold variant
tactggcgcttttatctcattactttagagccatcaccagcgactatgtcgtatgggtaaagcgcttatttatccagagaaatccgataaataagaagcatcaaag

SEQ ID NO: 587 - DNA, 107 bp, Artificial Sequence
  scaffold variant
cctggcgcttttatctcattactttgagagccatcaccagcgactatgtcgtatgggtaaagcgcttatttatcggggagaaatccgataaataagaagcatcaaag

SEQ ID NO: 588 - DNA, 110 bp, Artificial Sequence
  scaffold variant
tactggcgcttttatcttcattactttgagagccatcaccagcgactatgtcgtatgggtaaagcgcttatttatcggtagagaaatccgataaataagaagcatcaaag

SEQ ID NO: 589 - DNA, 108 bp, Artificial Sequence
  scaffold variant
tactggcgcttttattctcattactttgagagccatcaccagcgactatgtcgtatgggtaaagcgcttatttacggagagaaatccgataaataagaagcatcaaag

SEQ ID NO: 590 - DNA, 110 bp, Artificial Sequence
  scaffold variant
tactggcgcttttatcttcattactttgagagccatcaccagcgactatgtcgtatgggtaaagcgcttatttatcggagagaaatcgcgataaataagaagcatcaaag

SEQ ID NO: 591 - DNA, 106 bp, Artificial Sequence
  scaffold variant
tacggcgcttttatctcattactttgagagccatcaccagcgactatgtcgtatgggtaaagcgcttatttatcggagagaaatccataaataagaagcatcaaag

SEQ ID NO: 592 - DNA, 108 bp, Artificial Sequence
  scaffold variant
tactggcgcttttatctcattactttcgagagccatcaccagcgactatgtcgtatgggtaaagcgcttatttatcgcgagaaatccgataaataagaagcatcaaag

SEQ ID NO: 593 - DNA, 107 bp, Artificial Sequence
  scaffold variant
tacggcgcttttatctcattactttgagagccatcaccagcgactatgtcgtatgggtaaagcgcttatttgtcggagagaaatccgataaataagaagcatcaaag

SEQ ID NO: 594 - DNA, 105 bp, Artificial Sequence
  scaffold variant
atggcgcttttatctcattactttgagagccatcaccagcgactatgtcgtatgggtaaagcgcttatttatctagagaaatccgataaataagaagcatcaaag

SEQ ID NO: 595 - DNA, 108 bp, Artificial Sequence
  scaffold variant
actggcgcttttatctcattactttgagagccatcaccagcgactatgtcgtatgggtaaagcgcttatttatcggagagaaatccgtataaataagaagcatcaaag

SEQ ID NO: 596 - DNA, 108 bp, Artificial Sequence
  scaffold variant
actggcgcttttatctcattactttgagagccatcaccagcgactatgtcgtatgggtaaagcgcttatttatcgagagagaaatccgataaataagaagcatcaaag

SEQ ID NO: 597 - DNA, 108 bp, Artificial Sequence
  scaffold variant
tacggcgcttttatctcattactttgagagccatcaccagcgactatgtcgtatgggtaaagcgcttatttatgcggagagaaatccgataaataagaagcatcaaag

SEQ ID NO: 598 - DNA, 108 bp, Artificial Sequence
  scaffold variant
tactggcgcttttatcctcattactttgagagccatcaccagcgactatgtcgtatgggtaaagcgcttatttatcgagagaaatccgataaataagaagcatcaaag

SEQ ID NO: 599 - DNA, 108 bp, Artificial Sequence
  scaffold variant
cctggcgcttttatctcattactttgagagccatcaccagcgactatgtcgtatgggtaaagcgcttatttatcggagagaaatgccgataaataagaagcatcaaag

SEQ ID NO: 600 - DNA, 108 bp, Artificial Sequence
  scaffold variant
actggcgcttttatctcattactttgagagccatcaccagcgactatgtcgtatgggtaaagcgcttatttagtcggagagaaatccgataaataagaagcatcaaag

SEQ ID NO: 601 - DNA, 110 bp, Artificial Sequence
  scaffold variant
tactggcgcttttatcctcattactttgagagccatcaccagcgactatgtcgtatgggtaaagcgcttatttatcggagagaaatcgcgataaataagaagcatcaaag

SEQ ID NO: 602 - DNA, 108 bp, Artificial Sequence
  scaffold variant
tctggcgcttttatctcattactttgagagccatcaccagcgactatgtcgtatgggtaaagcgcttatttatcggagagaaataccgataaataagaagcatcaaag

SEQ ID NO: 603 - DNA, 107 bp, Artificial Sequence
  scaffold variant
tctggcgcttttatctcattactttgagagccatcaccagcgactatgtcgtatgggtaaagcgcttatttctcggagagaaatccgataaataagaagcatcaaag

SEQ ID NO: 604 - DNA, 106 bp, Artificial Sequence
  scaffold variant
actggcgcttttatctcattactttgagagccatcaccagcgactatgtcgtatgggtaaagcgcttatttatcggaagaaatccgataaataagaagcatcaaag

SEQ ID NO: 605 - DNA, 108 bp, Artificial Sequence
  scaffold variant
cctggcgcttttatctcattactttgagagccatcaccagcgactatgtcgtatgggtaaagcgcttatttatcggagagaaatccgataaataagtaagcatcaaag

SEQ ID NO: 606 - DNA, 108 bp, Artificial Sequence
  scaffold variant
tactggcgcttttatctctattactttgagagccatcaccagcgactatgtcgtatgggtaaagcgcttatttatcggagagaaatccataaataagaagcatcaaag

SEQ ID NO: 607 - DNA, 106 bp, Artificial Sequence
  scaffold variant
tacggcgcttttatctcattactttgagagccatcaccagcgactatgtcgtatgggtaaagcgcttatttatcggaagaaatccgataaataagaagcatcaaag

SEQ ID NO: 608 - DNA, 105 bp, Artificial Sequence
  scaffold variant
ctggcgcttttatctcattactttgagagccatcaccagcgactatgtcgtatgggtaaagcgcttatttatcggagataatccgataaataagaagcatcaaag

SEQ ID NO: 609 - DNA, 104 bp, Artificial Sequence
  scaffold variant
ctggcgcttttatctcattactttgagagccatcaccagcgactatgtcgtatgggtaaagcgcttatttatcggagaaatccgataaataagaagcatcaaag

SEQ ID NO: 610 - DNA, 108 bp, Artificial Sequence
  scaffold variant
tctggcgcttttatctcattactttgagagccatcaccagcgactatgtcgtatgggtaaagcgcttatttatccggagagaaatccgataaataagaagcatcaaag

SEQ ID NO: 611 - DNA, 106 bp, Artificial Sequence
  scaffold variant
cctggcgcttttatctcattactttgagagccatcaccagcgactatgtcgtatgggtaaagcgcttatttatcggagagaaatccggaaataagaagcatcaaag

SEQ ID NO: 612 - DNA, 106 bp, Artificial Sequence
  scaffold variant
tctggcgcttttatctcattactttgagagccatcaccagcgactatgtcgtatgggtaaagcgcttatttatcggagacaatccgataaataagaagcatcaaag

SEQ ID NO: 613 - DNA, 108 bp, Artificial Sequence
  scaffold variant
tactggcgcttttatcctcattactttgagagccatcaccagcgactatgtcgtatgggtaaagcgcttatttatcgggagaaatccgataaataagaagcatcaaag

SEQ ID NO: 614 - DNA, 105 bp, Artificial Sequence; identical to SEQ ID NO: 379
  scaffold variant

SEQ ID NO: 615 - DNA, 110 bp, Artificial Sequence
  scaffold variant
tactggcgcttttatctcattactttgagagccatcaccagcgactatgtcgtatgggtaaagcgcttatttatgcggagagaaatcgcgataaataagaagcatcaaag

SEQ ID NO: 616 - DNA, 108 bp, Artificial Sequence
  scaffold variant
ctactggcgcttttatctcattactttgagagccatcaccagcgactatgtcgtatgggtaaagcgcttatttatcgagagaaatccgataaataagaagcatcaaag

SEQ ID NO: 617 - DNA, 110 bp, Artificial Sequence
  scaffold variant
tactggcgcttttatcatcattactttgagagccatcaccagcgactatgtcgtatgggtaaagcgcttatttatcgggagagaaatccgataaataagaagcatcaaag

SEQ ID NO: 618 - DNA, 106 bp, Artificial Sequence
  scaffold variant
cctggcgcttttatctcattactttgagagccatcaccagcgactatgtcgtatgggtaaagcggtatttatcggagagaaatccgataaataagaagcatcaaag

SEQ ID NO: 619 - DNA, 108 bp, Artificial Sequence
  scaffold variant
tacggcgcttttatctcattactttgagagccatcaccagcgactatgtcgtatgggtaaagcgcttatttactcggagagaaatccgataaataagaagcatcaaag

SEQ ID NO: 620 - DNA, 108 bp, Artificial Sequence
  scaffold variant
tactggcgcttttatactcattactttgagagccatcaccagcgactatgtcgtatgggtaaagcgcttatttatcgagagaaatccgataaataagaagcatcaaag

SEQ ID NO: 621 - DNA, 106 bp, Artificial Sequence
  scaffold variant
cctggcgcttttatctcattactttagagccatcaccagcgactatgtcgtatgggtaaagcgcttatttatcggagagaaatccgataaataagaagcatcaaag

SEQ ID NO: 622 - DNA, 108 bp, Artificial Sequence
  scaffold variant
actggcgcttttatctcattactttgagagccatcaccagcgactatgtcgtatgggtaaagcgcttatttatcaggagagaaatccgataaataagaagcatcaaag

SEQ ID NO: 623 - DNA, 108 bp, Artificial Sequence
  scaffold variant
tactggcgcttttatctcattactttcgagagccatcaccagcgactatgtcgtatgggtaaagcgcttatttatcggaggaaatccgataaataagaagcatcaaag

SEQ ID NO: 624 - DNA, 110 bp, Artificial Sequence
  scaffold variant
tactggcgcttttatctctattactttgagagccatcaccagcgactatgtcgtatgggtaaagcgcttatttatccggagagaaatccgataaataagaagcatcaaag

SEQ ID NO: 625 - DNA, 106 bp, Artificial Sequence
  scaffold variant
cctggcgcttttatctcattactttgagagccatcaccagcgactatgtcgtatgggtaaagcgcttattatcggagagaaatccgataaataagaagcatcaaag

SEQ ID NO: 626 - DNA, 110 bp, Artificial Sequence
  scaffold variant
ttactggcgcttttatctcattactttgagagccatcaccagcgactatgtcgtatgggtaaagcgcttatttatgcggagagaaatccgataaataagaagcatcaaag

SEQ ID NO: 627 - DNA, 108 bp, Artificial Sequence
  scaffold variant
tactggcgcttttatctcattactttagagccatcaccagcgactatgtcgtatgggtaaagcgcttatttatcggagagaaatcgcgataaataagaagcatcaaag

SEQ ID NO: 628 - DNA, 108 bp, Artificial Sequence
  scaffold variant
tacggcgcttttatctcattactttgagagccatcaccagcgactatgtcgtatgggtaaagcgcttatttatcggagagaaatccgcataaataagaagcatcaaag

SEQ ID NO: 629 - DNA, 110 bp, Artificial Sequence
  scaffold variant
tactggcgcttttatcctcattactttgagagccatcaccagcgactatgtcgtatgggtaaagcgcttatttaatcggagagaaatccgataaataagaagcatcaaag

SEQ ID NO: 630 - DNA, 108 bp, Artificial Sequence
  scaffold variant
cctggcgcttttatctctattactttgagagccatcaccagcgactatgtcgtatgggtaaagcgcttatttatcggagagaaatccgataaataagaagcatcaaag

SEQ ID NO: 631 - DNA, 106 bp, Artificial Sequence
  scaffold variant
actggcgcttttatctcattactttgagagccatcaccagcgactatgtcgtatgggtaaagcgcttatttatcgggagaaatccgataaataagaagcatcaaag

SEQ ID NO: 632 - DNA, 106 bp, Artificial Sequence
  scaffold variant
actggcgcttttatctcattactttgagagccatcaccagcgactatgtcgtatgggtaaagcgcttatttatcggagagtatccgataaataagaagcatcaaag

SEQ ID NO: 633 - DNA, 106 bp, Artificial Sequence
  scaffold variant
cctggcgcttttatctcattactttgagagccatcaccagcgactatgtcgtatgggtaaagcgcttatttatcgggagaaatccgataaataagaagcatcaaag

SEQ ID NO: 634 - DNA, 107 bp, Artificial Sequence; identical to SEQ ID NO: 439
  scaffold variant

SEQ ID NO: 635 - DNA, 108 bp, Artificial Sequence
  scaffold variant
tctggcgcttttatctcattactttgagagccatcaccagcgactatgtcgtatgggtaaagcgcttatttactcggagagaaatccgataaataagaagcatcaaag

SEQ ID NO: 636 - DNA, 108 bp, Artificial Sequence
  scaffold variant
cctggcgcttttatcctcattactttgagagccatcaccagcgactatgtcgtatgggtaaagcgcttatttatcggagagaaatccgataaataagaagcatcaaag

SEQ ID NO: 637 - DNA, 107 bp, Artificial Sequence
  scaffold variant
atggcgcttttatctcattactttgagagccatcaccagcgactatgtcgtatgggtaaagcgcttatttatcggagagaaatcgcgataaataagaagcatcaaag

SEQ ID NO: 638 - DNA, 105 bp, Artificial Sequence
  scaffold variant
ctggcgcttttatctcattactttgagagccatcaccagcgactatgtcgtatgggtaaagcgcttatttatcggtagaaatccgataaataagaagcatcaaag

SEQ ID NO: 639 - DNA, 110 bp, Artificial Sequence
  scaffold variant
tactggcgcttttatctgcattactttgagagccatcaccagcgactatgtcgtatgggtaaagcgcttatttatgcggagagaaatccgataaataagaagcatcaaag

SEQ ID NO: 640 - DNA, 106 bp, Artificial Sequence
  scaffold variant
tacggcgcttttatctcattactttgagagccatcaccagcgactatgtcgtatgggtaaagcgcttatttatcggagagaaatccgtaaataagaagcatcaaag

SEQ ID NO: 641 - DNA, 108 bp, Artificial Sequence
  scaffold variant
tactggcgcttttatctcattactttgcagagccatcaccagcgactatgtcgtatgggtaaagcgcttatttatcgggagaaatccgataaataagaagcatcaaag

SEQ ID NO: 642 - DNA, 107 bp, Artificial Sequence
  scaffold variant
cctggcgcttttatctcattactttgagagccatcaccagcgactatgtcgtatgggtaaagcgcttatttctcggagagaaatccgataaataagaagcatcaaag

SEQ ID NO: 643 - DNA, 108 bp, Artificial Sequence
  scaffold variant
tctggcgcttttatctcattactttgagagccatcaccagcgactatgtcgtatgggtaaagcgcttatttagtcggagagaaatccgataaataagaagcatcaaag

SEQ ID NO: 644 - DNA, 108 bp, Artificial Sequence
  scaffold variant
tactggcgcttttattctcattactttgagagccatcaccagcgactatgtcgtatgggtaaagcgcttatttatcggagagaaagcgataaataagaagcatcaaag

SEQ ID NO: 645 - DNA, 108 bp, Artificial Sequence
  scaffold variant
tctggcgcttttatctcattactttgagagccatcaccagcgactatgtcgtatgggtaaagcgcttatttatcggagagataatccgataaataagaagcatcaaag

SEQ ID NO: 646 - DNA, 106 bp, Artificial Sequence
  scaffold variant
tctggcgcttttatctcattactttgagagccatcaccagcgactatgtcgtatgggtaaagcgcttatttatcggaagaaatccgataaataagaagcatcaaag

SEQ ID NO: 647 - DNA, 106 bp, Artificial Sequence
  scaffold variant
tacggcgcttttatctcattactttgagagccatcaccagcgactatgtcgtatgggtaaagcgcttatttatcggagataatccgataaataagaagcatcaaag

SEQ ID NO: 648 - DNA, 107 bp, Artificial Sequence
  scaffold variant
tctggcgcttttatctcattactttgagagccatcaccagcgactatgtcgtatgggtaaagcgcttatttatcggtgagaaatccgataaataagaagcatcaaag

SEQ ID NO: 649 - DNA, 110 bp, Artificial Sequence
  scaffold variant
tactggcgcttttatcctcattactttgagagccatcaccagcgactatgtcgtatgggtaaagcgcttatttatacggagagaaatccgataaataagaagcatcaaag

SEQ ID NO: 650 - DNA, 108 bp, Artificial Sequence
  scaffold variant
tctggcgcttttatctcattactttgagagccatcaccagcgactatgtcgtatgggtaaagcgcttattctatcggagagaaatccgataaataagaagcatcaaag

SEQ ID NO: 651 - DNA, 105 bp, Artificial Sequence; identical to SEQ ID NO: 428
  scaffold variant

SEQ ID NO: 652 - DNA, 106 bp, Artificial Sequence
  scaffold variant
tacggcgcttttatctcattactttgagagccatcaccagcgactatgtcgtatgggtaaagcgcttatttatcggcagaaatccgataaataagaagcatcaaag

SEQ ID NO: 653 - DNA, 110 bp, Artificial Sequence
  scaffold variant
tactggcgcttttatctcgattactttgagagccatcaccagcgactatgtcgtatgggtaaagcgcttatttattcggagagaaatccgataaataagaagcatcaaag

SEQ ID NO: 654 - DNA, 110 bp, Artificial Sequence
  scaffold variant
tactggcgcttttatcttcattactttgagagccatcaccagcgactatgtcgtatgggtaaagcgcttatttatcggagagaaatgccgataaataagaagcatcaaag

SEQ ID NO: 655 - DNA, 106 bp, Artificial Sequence
  scaffold variant
actggcgcttttatctcattactttgagagccatcaccagcgactatgtcgtatgggtaaagcgttatttatcggagagaaatccgataaataagaagcatcaaag

SEQ ID NO: 656 - DNA, 110 bp, Artificial Sequence
  scaffold variant
tactggcgcttttatctcattactttgagagccatcaccagcgactatgtcgtagtgggtaaagcgcttatttatgcggagagaaatccgataaataagaagcatcaaag

SEQ ID NO: 657 - DNA, 107 bp, Artificial Sequence
  scaffold variant
ctggcgcttttatctcattactttgagagccatcaccagcgactatgtcgtatgggtaaagcgcttatttatcggagagaaatcacgataaataagaagcatcaaag

SEQ ID NO: 658 - DNA, 108 bp, Artificial Sequence
  scaffold variant
tctggcgcttttatctcattactttgagagccatcaccagcgactatgtcgtatgggtaaagcgcttatttatcggagagaaatgccgataaataagaagcatcaaag

SEQ ID NO: 659 - DNA, 105 bp, Artificial Sequence
  scaffold variant
ctggcgcttttatctcattactttgagagccatcaccagcgactatgtcgtatgggtaaagcgcttatttatcggcagaaatccgataaataagaagcatcaaag

SEQ ID NO: 660 - DNA, 108 bp, Artificial Sequence
  scaffold variant
tactggcgcttttatctcattactttagagagccatcaccagcgactatgtcgtatgggtaaagcgcttatttattgagagaaatccgataaataagaagcatcaaag

SEQ ID NO: 661 - DNA, 108 bp, Artificial Sequence
  scaffold variant
tactggcgcttttatctcgattactttgagagccatcaccagcgactatgtcgtatgggtaaagcgcttatttacggagagaaatccgataaataagaagcatcaaag

SEQ ID NO: 662 - DNA, 110 bp, Artificial Sequence
  scaffold variant
tacctggcgcttttatctcattactttgagagccatcaccagcgactatgtcgtatgggtaaagcgcttatttatgcggagagaaatccgataaataagaagcatcaaag

SEQ ID NO: 663 - DNA, 110 bp, Artificial Sequence
  scaffold variant
tactggcgcttttatctcattactttagagagccatcaccagcgactatgtcgtatgggtaaagcgcttatttatacggagagaaatccgataaataagaagcatcaaag

SEQ ID NO: 664 - DNA, 108 bp, Artificial Sequence
  scaffold variant
tactggcgcttttatctctattactttgagagccatcaccagcgactatgtcgtatgggtaaagcgcttatttatcggagagaaatcgataaataagaagcatcaaag

SEQ ID NO: 665 - DNA, 110 bp, Artificial Sequence
  scaffold variant
tactggcgcttttattctcattactttgagagccatcaccagcgactatgtcgtatgggtaaagcgcttatttatcggagagaaatcccgataaataagaagcatcaaag

SEQ ID NO: 666 - DNA, 106 bp, Artificial Sequence
  scaffold variant
cctggcgcttttatctcattactttgagagccatcaccagcgactatgtcgtatgggtaaagctttatttatcggagagaaatccgataaataagaagcatcaaag

SEQ ID NO: 667 - DNA, 108 bp, Artificial Sequence
  scaffold variant
tctggcgcttttatctcattactttgagagccatcaccagcgactatgtcgtatgggtaaagcgcttatttatcggagagaaatccgactaaataagaagcatcaaag

SEQ ID NO: 668 - DNA, 108 bp, Artificial Sequence
  scaffold variant
tactggcgcttttatcttcattactttgagagccatcaccagcgactatgtcgtatgggtaaagcgcttatttatcggagagaaatccataaataagaagcatcaaag

SEQ ID NO: 669 - DNA, 108 bp, Artificial Sequence
  scaffold variant
tacggcgcttttatctcattactttgagagccatcaccagcgactatgtcgtattgggtaaagcgcttatttatcggagagaaatccgataaataagaagcatcaaag

SEQ ID NO: 670 - DNA, 108 bp, Artificial Sequence
  scaffold variant
cctggcgcttttatctcattactttgagagccatcaccagcgactatgtcgtatgggtaaagcgcttatttatcggtagagaaatccgataaataagaagcatcaaag

SEQ ID NO: 671 - DNA, 106 bp, Artificial Sequence
  scaffold variant
cctggcgcttttatctcattactttgagagccatcaccagcgactatgtcgtatgggtaaagcgcttatttatcggatgaaatccgataaataagaagcatcaaag

SEQ ID NO: 672 - DNA, 108 bp, Artificial Sequence
  scaffold variant
actggcgcttttatctcattactttgagagccatcaccagcgactatgtcgtatgggtaaagcgcttattatatcggagagaaatccgataaataagaagcatcaaag

SEQ ID NO: 673 - DNA, 108 bp, Artificial Sequence
  scaffold variant
tctggcgcttttatctcattactttgagagccatcaccagcgactatgtcgtatgggtaaagcgcttatttatcgagagagaaatccgataaataagaagcatcaaag

SEQ ID NO: 674 - DNA, 106 bp, Artificial Sequence
  scaffold variant
tacggcgcttttatctcattactttgagagccatcaccagcgactatgtcgtatgggtaaagcgcttatttacggagagaaatccgataaataagaagcatcaaag

SEQ ID NO: 675 - DNA, 108 bp, Artificial Sequence
  scaffold variant
tctggcgcttttatctcattactttgagagccatcaccagcgactatgtcgtatgggtaaagcgcttatttatcggagagaaatcctgataaataagaagcatcaaag

SEQ ID NO: 676 - DNA, 106 bp, Artificial Sequence
  scaffold variant
cctggcgcttttatctcattactttgagagccatcaccagcgactatgtcgtatgggtaaagcgcttatttatggagagaaatccgataaataagaagcatcaaag

SEQ ID NO: 677 - DNA, 105 bp, Artificial Sequence
  scaffold variant
atggcgcttttatctcattactttgagagccatcaccagcgactatgtcgtatgggtaaagcgcttattttcggagagaaatccgataaataagaagcatcaaag

SEQ ID NO: 678 - DNA, 107 bp, Artificial Sequence
  scaffold variant
ctggcgcttttatctcattactttgagagccatcaccagcgactatgtcgtatgggtaaagcgcttatttatcggagagaaatccgtataaataagaagcatcaaag

SEQ ID NO: 679 - DNA, 108 bp, Artificial Sequence
  scaffold variant
tctggcgcttttatctcattactttgagagccatcaccagcgactatgtcgtatgggtaaagcgcttatttatcggtagagaaatccgataaataagaagcatcaaag

SEQ ID NO: 680 - DNA, 110 bp, Artificial Sequence
  scaffold variant
tactggcgcttttatctcattactttgcagagccatcaccagcgactatgtcgtatgggtaaagcgcttatttattcggagagaaatccgataaataagaagcatcaaag

SEQ ID NO: 681 - DNA, 110 bp, Artificial Sequence
  scaffold variant
tactggcgcttttattctcattactttgagagccatcaccagcgactatgtcgtatgggtaaagcgcttatttatcggagagaaatgccgataaataagaagcatcaaag

SEQ ID NO: 682 - DNA, 105 bp, Artificial Sequence
  scaffold variant
tctggcgcttttatctcattactttgagagccatcaccagcgactatgtcgtatgggtaaagcgcttatttatcggggaaatccgataaataagaagcatcaaag

SEQ ID NO: 683 - DNA, 108 bp, Artificial Sequence
  scaffold variant
tacggcgcttttatctcattactttgagagccatcaccagcgactatgtcgtatgggtaaagcgcttatttatacggagagaaatccgataaataagaagcatcaaag

SEQ ID NO: 684 - DNA, 108 bp, Artificial Sequence
  scaffold variant
tactggcgcttttattctcattactttgagagccatcaccagcgactatgtcgtatgggtaaagcgcttatttatcggagagaaatcgataaataagaagcatcaaag

SEQ ID NO: 685 - DNA, 110 bp, Artificial Sequence
  scaffold variant
tactggcgcttttattctcattactttgagagccatcaccagcgactatgtcgtatgggtaaagcgcttatttatcggagagaaatctcgataaataagaagcatcaaag

SEQ ID NO: 686 - DNA, 110 bp, Artificial Sequence
  scaffold variant
tactggcgcttttattctcattactttgagagccatcaccagcgactatgtcgtatgggtaaagcgcttatttaatcggagagaaatccgataaataagaagcatcaaag

SEQ ID NO: 687 - DNA, 108 bp, Artificial Sequence
  scaffold variant
tactggcgcttttatctcattactttgagagccatcaccagcgactatgtcgtatgggtaaagcgcttatttatcgtagagaaatccgataaataagaagcatcaaag

SEQ ID NO: 688 - DNA, 106 bp, Artificial Sequence
  scaffold variant
tctggcgcttttatctcattactttgagagccatcaccagcgactatgtcgtatgggtaaagcgcttatttatccagagaaatccgataaataagaagcatcaaag

SEQ ID NO: 689 - DNA, 106 bp, Artificial Sequence
  scaffold variant
cctggcgcttttatctcattactttgagagccatcaccagcgactatgtcgtatgggtaaagcgcttatttatcggagagaaaacgataaataagaagcatcaaag

SEQ ID NO: 690 - DNA, 108 bp, Artificial Sequence
  scaffold variant
tactggcgcttttatcctcattactttgagagccatcaccagcgactatgtcgtatgggtaaagcgcttatttatcggagagaaatcgataaataagaagcatcaaag

SEQ ID NO: 691 - DNA, 110 bp, Artificial Sequence
  scaffold variant
tactggcgcttttatctgcattactttgagagccatcaccagcgactatgtcgtatgggtaaagcgcttatttatcgggagagaaatccgataaataagaagcatcaaag

SEQ ID NO: 692 - DNA, 106 bp, Artificial Sequence
  scaffold variant
gctggcgcttttatctcattactttgagagccatcaccagcgactatgtcgtatgggtaaagcgcttattttcggagagaaatccgataaataagaagcatcaaag

SEQ ID NO: 693 - DNA, 107 bp, Artificial Sequence
  scaffold variant
atggcgcttttatctcattactttgagagccatcaccagcgactatgtcgtatgggtaaagcgcttatttatacggagagaaatccgataaataagaagcatcaaag

SEQ ID NO: 694 - DNA, 108 bp, Artificial Sequence
  scaffold variant
tactggcgcttttatcttcattactttgagagccatcaccagcgactatgtcgtatgggtaaagcgcttatttatcggcagaaatccgataaataagaagcatcaaag

SEQ ID NO: 695 - DNA, 108 bp, Artificial Sequence
  scaffold variant
tctggcgcttttattctcattactttgagagccatcaccagcgactatgtcgtatgggtaaagcgcttatttatcggagagaaatccgataaataagaagcatcaaag

SEQ ID NO: 696 - DNA, 105 bp, Artificial Sequence
  scaffold variant
tctggcgcttttatctcattactttgagagccatcaccagcgactatgtcgtatgggtaaagcgcttatttatcggagagatccgataaataagaagcatcaaag

SEQ ID NO: 697 - DNA, 106 bp, Artificial Sequence
  scaffold variant
cctggcgcttttatctcattactttgagagccatcaccagcgactatgtcgtatgggtaaagcgcttatttatcggagagaaatccgatagtaagaagcatcaaag

SEQ ID NO: 698 - DNA, 105 bp, Artificial Sequence
  scaffold variant
ctggcgcttttatctcattactttgagagccatcaccagcgactatgtcgtatgggtaaagcgcttattttcggagagaaatccgataaataagaagcatcaaag

SEQ ID NO: 699 - DNA, 110 bp, Artificial Sequence
  scaffold variant
tactggcgcttttatctctattactttgagagccatcaccagcgactatgtcgtatgggtaaagcgcttatttatcggagagaaatctcgataaataagaagcatcaaag

SEQ ID NO: 700 - DNA, 108 bp, Artificial Sequence
  scaffold variant
tacggcgcttttatctcattactttgagagccatcaccagcgactatgtcgtatgggtaaagcgcttatttatcggagagaaataccgataaataagaagcatcaaag

SEQ ID NO: 701 - DNA, 108 bp, Artificial Sequence
  scaffold variant
tacggcgcttttatctcattactttgagagccatcaccagcgactatgtcgtatgggtaaagcgcttatttatcgtgagagaaatccgataaataagaagcatcaaag

SEQ ID NO: 702 - DNA, 110 bp, Artificial Sequence
  scaffold variant
tactggcgcttttatctgcattactttgagagccatcaccagcgactatgtcgtatgggtaaagcgcttatttatacggagagaaatccgataaataagaagcatcaaag

SEQ ID NO: 703 - DNA, 108 bp, Artificial Sequence
  scaffold variant
tctggcgcttttatctcattactttgagagccatcaccagcgactatgtcgtatgggtaaagcgcttatttatctggagagaaatccgataaataagaagcatcaaag

SEQ ID NO: 704 - DNA, 108 bp, Artificial Sequence
  scaffold variant
tactggcgcttttattctcattactttgagagccatcaccagcgactatgtcgtatgggtaaagcgcttatttatccagagaaatccgataaataagaagcatcaaag

SEQ ID NO: 705 - DNA, 107 bp, Artificial Sequence
  scaffold variant
ctggcgcttttatctcattactttgagagccatcaccagcgactatgtcgtatgggtaaagcgcttatttatcggagagaaatccgaataaataagaagcatcaaag

SEQ ID NO: 706 - DNA, 108 bp, Artificial Sequence
  scaffold variant
tactggcgcttttattctcattactttgagagccatcaccagcgactatgtcgtatgggtaaagcgcttatttatcgagagaaatccgataaataagaagcatcaaag

SEQ ID NO: 707 - DNA, 110 bp, Artificial Sequence
  scaffold variant
tactggcgcttttattctcattactttgagagccatcaccagcgactatgtcgtatgggtaaagcgcttatttatcgtgagagaaatccgataaataagaagcatcaaag

SEQ ID NO: 708 - DNA, 108 bp, Artificial Sequence
  scaffold variant
cctggcgcttttatctcattactttgagagccatcaccagcgactatgtcgtatgggtaaagcgcttatttatcgagagagaaatccgataaataagaagcatcaaag

SEQ ID NO: 709 - DNA, 106 bp, Artificial Sequence
  scaffold variant
tctggcgcttttatctcattactttgagagccatcaccagcgactatgtcgtatgggtaaagcgcttatttatcggagagaaatccataaataagaagcatcaaag

SEQ ID NO: 710 - DNA, 108 bp, Artificial Sequence
  scaffold variant
tactggcgcttttatctcattactttgagagccatcaccagcgactatgtcgtattgggtaaagcgcttatttatcgggagaaatccgataaataagaagcatcaaag

SEQ ID NO: 711 - DNA, 105 bp, Artificial Sequence; identical to SEQ ID NO: 503
  scaffold variant

SEQ ID NO: 712 - DNA, 108 bp, Artificial Sequence
  scaffold variant
tactggcgcttttattctcattactttgagagccatcaccagcgactatgtcgtatgggtaaagcgcttatttatcggagagagtccgataaataagaagcatcaaag

SEQ ID NO: 713 - DNA, 108 bp, Artificial Sequence
  scaffold variant
cctggcgcttttatctcattactttgagagccatcaccagcgactatgtcgtatgggtaaagcgcttatttatcaggagagaaatccgataaataagaagcatcaaag

SEQ ID NO: 714 - DNA, 107 bp, Artificial Sequence; identical to SEQ ID NO: 439
  scaffold variant

SEQ ID NO: 715 - DNA, 106 bp, Artificial Sequence
  scaffold variant
tctggcgcttttatctcattactttgagagccatcaccagcgactatgtcgtatgggtaaagcgcttatttatcggagagtatccgataaataagaagcatcaaag

SEQ ID NO: 716 - DNA, 106 bp, Artificial Sequence
  scaffold variant
cctggcgcttttatctcattactttgagagccatcaccagcgactatgtcgtatgggtaaagcgcttatttatcggagagaaagcgataaataagaagcatcaaag

SEQ ID NO: 717 - DNA, 108 bp, Artificial Sequence
  scaffold variant
tacggcgcttttatctcattactttgagagccatcaccagcgactatgtcgtagtgggtaaagcgcttatttatcggagagaaatccgataaataagaagcatcaaag

SEQ ID NO: 718 - DNA, 108 bp, Artificial Sequence
  scaffold variant
actggcgcttttatctcattactttgagagccatcaccagcgactatgtcgtatgggtaaagcgcttatttatcggagagaaatgccgataaataagaagcatcaaag

SEQ ID NO: 719 - DNA, 107 bp, Artificial Sequence
  scaffold variant
tactggcgcttttatctcattactttagagagccatcaccagcgactatgtcgtatgggtaaagcgcttatttatcggagaaatccgataaataagaagcatcaaag

SEQ ID NO: 720 - DNA, 106 bp, Artificial Sequence
  scaffold variant
actggcgcttttatctcattactttgagagccatcaccagcgactatgtcgtatgggtaaagcgcttatttacggagagaaatccgataaataagaagcatcaaag

SEQ ID NO: 721 - DNA, 104 bp, Artificial Sequence
  scaffold variant
tggcgcttttatctcattactttgagagccatcaccagcgactatgtcgtatgggtaaagcgcttatttatcgagagaaatccgataaataagaagcatcaaag

SEQ ID NO: 722 - DNA, 108 bp, Artificial Sequence
  scaffold variant
tactggcgcttttattctcattactttgagagccatcaccagcgactatgtcgtatgggtaaagcgcttatttatcggagataatccgataaataagaagcatcaaag

SEQ ID NO: 723 - DNA, 108 bp, Artificial Sequence
  scaffold variant
tactggcgcttttatctgcattactttgagagccatcaccagcgactatgtcgtatgggtaaagcgcttattttcggagagaaatccgataaataagaagcatcaaag

SEQ ID NO: 724 - DNA, 107 bp, Artificial Sequence
  scaffold variant
ctggcgcttttatctcattactttgagagccatcaccagcgactatgtcgtatgggtaaagcgcttatttatcggcagagaaatccgataaataagaagcatcaaag

SEQ ID NO: 725 - DNA, 108 bp, Artificial Sequence
  scaffold variant
gctggcgcttttatctcattactttgagagccatcaccagcgactatgtcgtatgggtaaagcgcttatttatcggagagaaatccgtataaataagaagcatcaaag

SEQ ID NO: 726 - DNA, 108 bp, Artificial Sequence
  scaffold variant
tacggcgcttttatctcattactttgagagccatcaccagcgactatgtcgtatgggtaaagcgcttatttatcggagagaaatcacgataaataagaagcatcaaag

SEQ ID NO: 727 - DNA, 106 bp, Artificial Sequence
  scaffold variant
tacggcgcttttatctcattactttgagagccatcaccagcgactatgtcgtatgggtaaagcggtatttatcggagagaaatccgataaataagaagcatcaaag

SEQ ID NO: 728 - DNA, 110 bp, Artificial Sequence
  scaffold variant
tactggcgcttttatctcattactttcgagagccatcaccagcgactatgtcgtatgggtaaagcgcttatttatcggagagaaatgccgataaataagaagcatcaaag

SEQ ID NO: 729 - DNA, 108 bp, Artificial Sequence
  scaffold variant
tactggcgcttttatctgcattactttgagagccatcaccagcgactatgtcgtatgggtaaagcgcttatttatctagagaaatccgataaataagaagcatcaaag

SEQ ID NO: 730 - DNA, 105 bp, Artificial Sequence
  scaffold variant
atggcgcttttatctcattactttgagagccatcaccagcgactatgtcgtatgggtaaagcgcttatttatccagagaaatccgataaataagaagcatcaaag

SEQ ID NO: 731 - DNA, 105 bp, Artificial Sequence
  scaffold variant
ctggcgcttttatctcattactttgagagccatcaccagcgactatgtcgtatgggtaaagcgcttatttatcgtgagaaatccgataaataagaagcatcaaag

SEQ ID NO: 732 - DNA, 106 bp, Artificial Sequence
  scaffold variant
cctggcgcttttatctcattactttgagagccatcaccagcgactatgtcgtatgggtaaagcgcttatttatcggagagaaattgataaataagaagcatcaaag

SEQ ID NO: 733 - DNA, 105 bp, Artificial Sequence
  scaffold variant
tctggcgcttttatctcattactttgagagccatcaccagcgactatgtcgtatgggtaaagcgcttatttatcggagagaaccgataaataagaagcatcaaag

SEQ ID NO: 734 - DNA, 110 bp, Artificial Sequence
  scaffold variant
tactggcgcttttatctgcattactttgagagccatcaccagcgactatgtcgtatgggtaaagcgcttatttatcggagagaaatcgcgataaataagaagcatcaaag

SEQ ID NO: 735 - DNA, 108 bp, Artificial Sequence
  scaffold variant
cctggcgcttttatctcattactttgagagccatcaccagcgactatgtcgtatgggtaaagcgcttattatatcggagagaaatccgataaataagaagcatcaaag

SEQ ID NO: 736 - DNA, 105 bp, Artificial Sequence
  scaffold variant
cctggcgcttttatctcattactttgagagccatcaccagcgactatgtcgtatgggtaaagcgcttatttatcggagtaatccgataaataagaagcatcaaag

SEQ ID NO: 737 - DNA, 106 bp, Artificial Sequence
  scaffold variant
tctggcgcttttatctcattactttgagagccatcaccagcgactatgtcgtatgggtaaagcgcttatttatcgggagaaatccgataaataagaagcatcaaag

SEQ ID NO: 738 - DNA, 105 bp, Artificial Sequence
  scaffold variant
atggcgcttttatctcattactttgagagccatcaccagcgactatgtcgtatgggtaaagcgcttatttacggagagaaatccgataaataagaagcatcaaag

SEQ ID NO: 739 - DNA, 105 bp, Artificial Sequence
  scaffold variant
atggcgcttttatctcattactttgagagccatcaccagcgactatgtcgtatgggtaaagcgcttatttatcaagagaaatccgataaataagaagcatcaaag

SEQ ID NO: 740 - DNA, 109 bp, Artificial Sequence
  scaffold variant
tactggcgcttttatctcattactttgagagccatcaccagcgactatgtcgtatgggtaaagcgcttatttatgcggagagaaatccgataaataagaagcatcaaag

SEQ ID NO: 741 - DNA, 105 bp, Artificial Sequence
  scaffold variant
ctggcgcttttatctcattactttgagagccatcaccagcgactatgtcgtatgggtaaagcgcttatttatcggagagaaattgataaataagaagcatcaaag

SEQ ID NO: 742 - DNA, 110 bp, Artificial Sequence
  scaffold variant
tactggcgcttttatcttcattactttgagagccatcaccagcgactatgtcgtatgggtaaagcgcttatttatcaggagagaaatccgataaataagaagcatcaaag

SEQ ID NO: 743 - DNA, 106 bp, Artificial Sequence
  scaffold variant
cctggcgcttttatctcattactttgagagccatcaccagcgactatgtcgtatgggtaaagcgcttatttatcggagagagtccgataaataagaagcatcaaag

SEQ ID NO: 744 - DNA, 108 bp, Artificial Sequence
  scaffold variant
cctggcgcttttatctcattactttgagagccatcaccagcgactatgtcgtatgggtaaagcgcttatttatcggagagaaatccgagtaaataagaagcatcaaag

SEQ ID NO: 745 - DNA, 106 bp, Artificial Sequence
  scaffold variant
tactggcgcttttatctcattactttagagccatcaccagcgactatgtcgtatgggtaaagcgcttatttattgagagaaatccgataaataagaagcatcaaag

SEQ ID NO: 746 - DNA, 104 bp, Artificial Sequence
  scaffold variant
atggcgcttttatctcattactttgagagccatcaccagcgactatgtcgtatgggtaaagcgcttatttatcggagaaatccgataaataagaagcatcaaag

SEQ ID NO: 747 - DNA, 110 bp, Artificial Sequence
  scaffold variant
tactggcgcttttatctcattactttgagagccatcaccagcgactatgtcgtatgggtaaagcgcttatttatccggagagaaatcccgataaataagaagcatcaaag

SEQ ID NO: 748 - DNA, 106 bp, Artificial Sequence
  scaffold variant
tctggcgcttttatctcattactttgagagccatcaccagcgactatgtcgtatgggtaaagcgcttatttattgagagaaatccgataaataagaagcatcaaag

SEQ ID NO: 749 - DNA, 108 bp, Artificial Sequence
  scaffold variant
cctggcgcttttatctcattactttgagagccatcaccagcgactatgtcgtatgggtaaagcgcttattttatcggagagaaatccgataaataagaagcatcaaag

SEQ ID NO: 750 - DNA, 108 bp, Artificial Sequence
  scaffold variant
tactggcgcttttattctcattactttgagagccatcaccagcgactatgtcgtatgggtaaagcgcttatttatcggagagaaatccataaataagaagcatcaaag

SEQ ID NO: 751 - DNA, 108 bp, Artificial Sequence
  scaffold variant
cctggcgcttttatctcattactttgagagccatcaccagcgactatgtcgtatgggtaaagcgcttatttatcggagagaaaatccgataaataagaagcatcaaag

SEQ ID NO: 752 - DNA, 108 bp, Artificial Sequence
  scaffold variant
actggcgcttttatctcattactttgagagccatcaccagcgactatgtcgtatgggtaaagcgcttatttatcggtagagaaatccgataaataagaagcatcaaag

SEQ ID NO: 753 - DNA, 106 bp, Artificial Sequence
  scaffold variant
tactggcgcttttatctcattactttagagccatcaccagcgactatgtcgtatgggtaaagcgcttatttatctagagaaatccgataaataagaagcatcaaag

SEQ ID NO: 754 - DNA, 108 bp, Artificial Sequence
  scaffold variant
tactggcgcttttatctcattactttgagagccatcaccagcgactatgtcgtagtgggtaaagcgcttatttatcgagagaaatccgataaataagaagcatcaaag

SEQ ID NO: 755 - DNA, 108 bp, Artificial Sequence
  scaffold variant
cctggcgcttttatctcattactttgtagagccatcaccagcgactatgtcgtatgggtaaagcgcttatttatcggagagaaatccgataaataagaagcatcaaag

SEQ ID NO: 756 - DNA, 107 bp, Artificial Sequence
  scaffold variant
ctggcgcttttatctcattactttcgagagccatcaccagcgactatgtcgtatgggtaaagcgcttatttatcggagagaaatccgataaataagaagcatcaaag

SEQ ID NO: 757 - DNA, 110 bp, Artificial Sequence
  scaffold variant
tactggcgcttttattctcattactttgagagccatcaccagcgactatgtcgtagtgggtaaagcgcttatttatcggagagaaatccgataaataagaagcatcaaag

SEQ ID NO: 758 - DNA, 107 bp, Artificial Sequence
  scaffold variant
tacggcgcttttatctcattactttgagagccatcaccagcgactatgtcgtatgggtaaagcgcttatttttcggagagaaatccgataaataagaagcatcaaag

SEQ ID NO: 759 - DNA, 106 bp, Artificial Sequence
  scaffold variant
cctggcgcttttatctcattactttgagagccatcaccagcgactatgtcgtatgggtaaagcgcttatttatcggagagaatccgataaataagaagcatcaaag

SEQ ID NO: 760 - DNA, 106 bp, Artificial Sequence
  scaffold variant
gctggcgcttttatctcattactttgagagccatcaccagcgactatgtcgtatgggtaaagcgcttatttatcgtgagaaatccgataaataagaagcatcaaag

SEQ ID NO: 761 - DNA, 121 bp, Artificial Sequence
  scaffold variant
tactggcgcttttatctcattactttgctcattactttgagagccatcaccagcgactatgtcgtatgggtaaagcgcttatttatacggagagaaatccgataaataagaagcatcaaag

SEQ ID NO: 762 - DNA, 106 bp, Artificial Sequence
  scaffold variant
tctggcgcttttatctcattactttgagagccatcaccagcgactatgtcgtatgggtaaagcgcttatttatcggagagaatccgataaataagaagcatcaaag

SEQ ID NO: 763 - DNA, 108 bp, Artificial Sequence
  scaffold variant
gctggcgcttttatctcattactttgagagccatcaccagcgactatgtcgtatgggtaaagcgcttatttatcggagagaaatcacgataaataagaagcatcaaag

SEQ ID NO: 764 - DNA, 110 bp, Artificial Sequence
  scaffold variant
tactggcgcttttatctcattactttcgagagccatcaccagcgactatgtcgtatgggtaaagcgcttatttactcggagagaaatccgataaataagaagcatcaaag

SEQ ID NO: 765 - DNA, 107 bp, Artificial Sequence
  scaffold variant
tactggcgcttttatctcattactttgagagccatcaccagcgactatgtcgtatgggtaaagcgcttatttatcgcgagaaatccgataaataagaagcatcaaag

SEQ ID NO: 766 - DNA, 110 bp, Artificial Sequence
  scaffold variant
tactggcgcttttattctcattactttgagagccatcaccagcgactatgtcgtatgggtaaagcgcttattatatcggagagaaatccgataaataagaagcatcaaag

SEQ ID NO: 767 - DNA, 108 bp, Artificial Sequence
  scaffold variant
tactggcgcttttatcttcattactttgagagccatcaccagcgactatgtcgtatgggtaaagcgcttatttatcgggagaaatccgataaataagaagcatcaaag

SEQ ID NO: 768 - DNA, 106 bp, Artificial Sequence
  scaffold variant
tggcgcttttatctcattactttgagagccatcaccagcgactatgtcgtatgggtaaagcgcttatttatccggagagaaatccgataaataagaagcatcaaag

SEQ ID NO: 769 - DNA, 108 bp, Artificial Sequence
  scaffold variant
tctggcgcttttatctcattactttgagagccatcaccagcgactatgtcgtatgggtaaagcgcttatttatcgggagagaaatccgataaataagaagcatcaaag

SEQ ID NO: 770 - DNA, 108 bp, Artificial Sequence
  scaffold variant
actggcgcttttatctcattactttgagagccatcaccagcgactatgtcgtatgggtaaagcgcttatttatctggagagaaatccgataaataagaagcatcaaag

SEQ ID NO: 771 - DNA, 106 bp, Artificial Sequence
  scaffold variant
tggcgcttttatctcattactttgagagccatcaccagcgactatgtcgtatgggtaaagcgcttatttatcggagagaaatcgcgataaataagaagcatcaaag

SEQ ID NO: 772 - DNA, 108 bp, Artificial Sequence
  scaffold variant
actggcgcttttatctcattactttgagagccatcaccagcgactatgtcgtatgggtaaagcgcttatttatcggagagacaatccgataaataagaagcatcaaag

SEQ ID NO: 773 - DNA, 106 bp, Artificial Sequence
  scaffold variant
cctggcgcttttatctcattactttgagagccatcaccagcgactatgtcgtatgggtaaagcgcttatttatagagagaaatccgataaataagaagcatcaaag

SEQ ID NO: 774 - DNA, 108 bp, Artificial Sequence
  scaffold variant
gctggcgcttttatctcattactttgagagccatcaccagcgactatgtcgtatgggtaaagcgcttatttatctggagagaaatccgataaataagaagcatcaaag

SEQ ID NO: 775 - DNA, 108 bp, Artificial Sequence
  scaffold variant
tactggcgcttttatctcattactttgcagagccatcaccagcgactatgtcgtatgggtaaagcgcttatttatcggagagaaatccataaataagaagcatcaaag

SEQ ID NO: 776 - DNA, 108 bp, Artificial Sequence
  scaffold variant
tctggcgcttttatctcattactttgagagccatcaccagcgactatgtcgtatgggtaaagcgcttatttaatcggagagaaatccgataaataagaagcatcaaag

SEQ ID NO: 777 - DNA, 104 bp, Artificial Sequence
  scaffold variant
tggcgcttttatctcattactttgagagccatcaccagcgactatgtcgtatgggtaaagcgcttatttatctagagaaatccgataaataagaagcatcaaag

SEQ ID NO: 778 - DNA, 108 bp, Artificial Sequence
  scaffold variant
tactggcgcttttatctcattactttgagagccatcaccagcgactatgtcgtatgggtaaagcgcttatttatcgcagagaaatccgataaataagaagcatcaaag

SEQ ID NO: 779 - DNA, 110 bp, Artificial Sequence
  scaffold variant
tactggcgcttttatcttcattactttgagagccatcaccagcgactatgtcgtatgggtaaagcgcttatttatcgggagagaaatccgataaataagaagcatcaaag

SEQ ID NO: 780 - DNA, 108 bp, Artificial Sequence
  scaffold variant
tactggcgcttttatcttcattactttgagagccatcaccagcgactatgtcgtatgggtaaagcgcttatttatcggagagaaatcgataaataagaagcatcaaag

SEQ ID NO: 781 - DNA, 106 bp, Artificial Sequence
  scaffold variant
cctggcgcttttatctcattactttgagagccatcaccagcgactatgtcgtatgggtaaagcgcttatttatcggagcaaatccgataaataagaagcatcaaag

SEQ ID NO: 782 - DNA, 108 bp, Artificial Sequence
  scaffold variant
tactggcgcttttattctcattactttgagagccatcaccagcgactatgtcgtatgggtaaagcgcttatttatcggagagaaatccgaaaataagaagcatcaaag

SEQ ID NO: 783 - DNA, 108 bp, Artificial Sequence
  scaffold variant
ttactggcgcttttatctcattactttgagagccatcaccagcgactatgtcgtatgggtaaagcgcttatttatcgagagaaatccgataaataagaagcatcaaag

SEQ ID NO: 784 - DNA, 107 bp, Artificial Sequence
  scaffold variant
atggcgcttttatctcattactttgagagccatcaccagcgactatgtcgtatgggtaaagcgcttatttatcggagagaaatcccgataaataagaagcatcaaag

SEQ ID NO: 785 - DNA, 108 bp, Artificial Sequence
  scaffold variant
actggcgcttttatctcattactttgagagccatcaccagcgactatgtcgtatgggtaaagcgcttatttatcggagagaaataccgataaataagaagcatcaaag

SEQ ID NO: 786 - DNA, 106 bp, Artificial Sequence
  scaffold variant
tctggcgcttttatctcattactttgagagccatcaccagcgactatgtcgtatgggtaaagcgcttatttatcggcagaaatccgataaataagaagcatcaaag

SEQ ID NO: 787 - DNA, 104 bp, Artificial Sequence
  scaffold variant
tggcgcttttatctcattactttgagagccatcaccagcgactatgtcgtatgggtaaagcgcttatttatcaagagaaatccgataaataagaagcatcaaag

SEQ ID NO: 788 - DNA, 110 bp, Artificial Sequence
  scaffold variant
tactggcgcttttatctcattactttgcagagccatcaccagcgactatgtcgtatgggtaaagcgcttatttatccggagagaaatccgataaataagaagcatcaaag

SEQ ID NO: 789 - DNA, 105 bp, Artificial Sequence
  scaffold variant
ctggcgcttttatctcattactttgagagccatcaccagcgactatgtcgtatgggtaaagcgcttatttacggagagaaatccgataaataagaagcatcaaag

SEQ ID NO: 790 - DNA, 106 bp, Artificial Sequence
  scaffold variant
tctggcgcttttatctcattactttgagagccatcaccagcgactatgtcgtatgggtaaagcgcttattttcggagagaaatccgataaataagaagcatcaaag

SEQ ID NO: 791 - DNA, 106 bp, Artificial Sequence
  scaffold variant
cctggcgcttttatctcattactttgagagccatcaccagcgactatgtcgtatgggtaaagcgcttatttatcggcagaaatccgataaataagaagcatcaaag

SEQ ID NO: 792 - DNA, 104 bp, Artificial Sequence; identical to SEQ ID NO: 721
  scaffold variant

SEQ ID NO: 793 - DNA, 110 bp, Artificial Sequence
  scaffold variant
tactggcgcttttatctctattactttgagagccatcaccagcgactatgtcgtatgggtaaagcgcttatttatcggcagagaaatccgataaataagaagcatcaaag

SEQ ID NO: 794 - DNA, 108 bp, Artificial Sequence
  scaffold variant
tctggcgcttttatctcattactttgagagccatcaccagcgactatgtcgtattgggtaaagcgcttatttatcggagagaaatccgataaataagaagcatcaaag

SEQ ID NO: 795 - DNA, 108 bp, Artificial Sequence
  scaffold variant
tactggcgcttttatcctcattactttgagagccatcaccagcgactatgtcgtatgggtaaagcgcttatttatcggagataatccgataaataagaagcatcaaag

SEQ ID NO: 796 - DNA, 108 bp, Artificial Sequence
  scaffold variant
tactggcgcttttatctcattactttcgagagccatcaccagcgactatgtcgtatgggtaaagcgcttatttatcggaagaaatccgataaataagaagcatcaaag

SEQ ID NO: 797 - DNA, 108 bp, Artificial Sequence
  scaffold variant
tctggcgcttttatctcattactttgagagccatcaccagcgactatgtcgtatgggtaaagcgcttatttatcggcagagaaatccgataaataagaagcatcaaag

SEQ ID NO: 798 - DNA, 105 bp, Artificial Sequence
  scaffold variant
ctggcgcttttatctcattactttgagagccatcaccagcgactatgtcgtatgggtaaagcgcttatttatcggagagaaagcgataaataagaagcatcaaag

SEQ ID NO: 799 - DNA, 110 bp, Artificial Sequence
  scaffold variant
tactggcgcttttatctgcattactttgagagccatcaccagcgactatgtcgtatgggtaaagcgcttatttatcggagagaaatcccgataaataagaagcatcaaag

SEQ ID NO: 800 - DNA, 106 bp, Artificial Sequence
  scaffold variant
cctggcgcttttatctcattactttgagagccatcaccagcgactatgtcgtatgggtaaagcgcttatttatcggtagaaatccgataaataagaagcatcaaag

SEQ ID NO: 801 - DNA, 108 bp, Artificial Sequence
  scaffold variant
tctggcgcttttatctcattactttgagagccatcaccagcgactatgtcgtatgggtaaagcgcttattttatcggagagaaatccgataaataagaagcatcaaag

SEQ ID NO: 802 - DNA, 109 bp, Artificial Sequence
  scaffold variant
tactggcgcttttatctcattactttgagagccatcaccagcgactatgtcgtatgggtaaagcgcttatttatcggcagagaaatccgataaataagaagcatcaaag

SEQ ID NO: 803 - DNA, 106 bp, Artificial Sequence
  scaffold variant
actggcgcttttatctcattactttgagagccatcaccagcgactatgtcgtatgggtaaagcgcttatttatcggagaggatccgataaataagaagcatcaaag

SEQ ID NO: 804 - DNA, 108 bp, Artificial Sequence
  scaffold variant
tactggcgcttttatctcattactttcgagagccatcaccagcgactatgtcgtatgggtaaagcgcttatttatcggagacaatccgataaataagaagcatcaaag

SEQ ID NO: 805 - DNA, 107 bp, Artificial Sequence
  scaffold variant
tctggcgcttttatctcattactttgagagccatcaccagcgactatgtcgtatgggtaaagcgcttatttatcggagagaaatccggtaaataagaagcatcaaag

SEQ ID NO: 806 - DNA, 108 bp, Artificial Sequence
  scaffold variant
gctggcgcttttatctcattactttgagagccatcaccagcgactatgtcgtattgggtaaagcgcttatttatcggagagaaatccgataaataagaagcatcaaag

SEQ ID NO: 807 - DNA, 106 bp, Artificial Sequence; identical to SEQ ID NO: 768
  scaffold variant

SEQ ID NO: 808 - DNA, 108 bp, Artificial Sequence
  scaffold variant
cctggcgcttttatctcattactttgagagccatcaccagcgactatgtcgtatgggtaaagcgcttatttatcggagagtaaatccgataaataagaagcatcaaag

SEQ ID NO: 809 - DNA, 106 bp, Artificial Sequence; identical to SEQ ID NO: 385
  scaffold variant

SEQ ID NO: 810 - DNA, 110 bp, Artificial Sequence
  scaffold variant
tactggcgcttttatcttcattactttgagagccatcaccagcgactatgtcgtattgggtaaagcgcttatttatcggagagaaatccgataaataagaagcatcaaag

SEQ ID NO: 811 - DNA, 108 bp, Artificial Sequence
  scaffold variant
tactggcgcttttatcttcattactttgagagccatcaccagcgactatgtcgtatgggtaaagcgcttatttatcggagagtatccgataaataagaagcatcaaag

SEQ ID NO: 812 - DNA, 110 bp, Artificial Sequence
  scaffold variant
tactggcgcttttatcttcattactttgagagccatcaccagcgactatgtcgtatgggtaaagcgcttatttactcggagagaaatccgataaataagaagcatcaaag

SEQ ID NO: 813 - DNA, 108 bp, Artificial Sequence
  scaffold variant
gctggcgcttttatctcattactttgagagccatcaccagcgactatgtcgtatgggtaaagcgcttatttagtcggagagaaatccgataaataagaagcatcaaag

SEQ ID NO: 814 - DNA, 106 bp, Artificial Sequence
  scaffold variant
actggcgcttttatctcattactttgagagccatcaccagcgactatgtcgtatgggtaaagcgcttatttatcggagagaagccgataaataagaagcatcaaag

SEQ ID NO: 815 - DNA, 105 bp, Artificial Sequence
  scaffold variant
atggcgcttttatctcattactttgagagccatcaccagcgactatgtcgtatgggtaaagcgcttatttatcggagagaaatcgataaataagaagcatcaaag

SEQ ID NO: 816 - DNA, 105 bp, Artificial Sequence
  scaffold variant
atggcgcttttatctcattactttgagagccatcaccagcgactatgtcgtatgggtaaagcgcttatttatcggagagaaatccataaataagaagcatcaaag

SEQ ID NO: 817 - DNA, 105 bp, Artificial Sequence; identical to SEQ ID NO: 408
  scaffold variant

SEQ ID NO: 818 - DNA, 108 bp, Artificial Sequence
  scaffold variant
tactggcgcttttatcttcattactttgagagccatcaccagcgactatgtcgtatgggtaaagcgcttatttatcggagataatccgataaataagaagcatcaaag

SEQ ID NO: 819 - DNA, 108 bp, Artificial Sequence
  scaffold variant
tactggcgcttttatctcattactttgcagagccatcaccagcgactatgtcgtatgggtaaagcgcttatttatcggagagaaaacgataaataagaagcatcaaag

SEQ ID NO: 820 - DNA, 105 bp, Artificial Sequence
  scaffold variant
tacggcgcttttatctcattactttgagagccatcaccagcgactatgtcgtatgggtaaagcgtatttatcggagagaaatccgataaataagaagcatcaaag

SEQ ID NO: 821 - DNA, 105 bp, Artificial Sequence
  scaffold variant
ctggcgcttttatctcattactttgagagccatcaccagcgactatgtcgtatgggtaaagcggtatttatcggagagaaatccgataaataagaagcatcaaag

SEQ ID NO: 822 - DNA, 110 bp, Artificial Sequence
  scaffold variant
tactggcgcttttatctcattactttgagagccatcaccagcgactatgtcgtatgggtaaagcgcttatttatgcggagagaaatctcgataaataagaagcatcaaag

SEQ ID NO: 823 - DNA, 106 bp, Artificial Sequence
  scaffold variant
cctggcgcttttatctcattactttgagagccatcaccagcgactatgtcgtatgggtaaagcgcttatttatcggagagcatccgataaataagaagcatcaaag

SEQ ID NO: 824 - DNA, 108 bp, Artificial Sequence
  scaffold variant
gctggcgcttttattctcattactttgagagccatcaccagcgactatgtcgtatgggtaaagcgcttatttatcggagagaaatccgataaataagaagcatcaaag

SEQ ID NO: 825 - DNA, 107 bp, Artificial Sequence
  scaffold variant
cctggcgcttttatctcattactttgagagccatcaccagcgactatgtcgtatgggtaaagcgcttatttatcggagtgaaatccgataaataagaagcatcaaag

SEQ ID NO: 826 - DNA, 108 bp, Artificial Sequence
  scaffold variant
tacggcgcttttatctcattactttgagagccatcaccagcgactatgtcgtatgggtaaagcgcttatttaatcggagagaaatccgataaataagaagcatcaaag

SEQ ID NO: 827 - DNA, 106 bp, Artificial Sequence
  scaffold variant
tacggcgcttttatctcattactttgagagccatcaccagcgactatgtcgtatgggtaaagcgcttatttatcggagagaaatccggaaataagaagcatcaaag

SEQ ID NO: 828 - DNA, 106 bp, Artificial Sequence
  scaffold variant
tactggcgcttttattcattactttgagagccatcaccagcgactatgtcgtatgggtaaagcgcttatttatcaagagaaatccgataaataagaagcatcaaag

SEQ ID NO: 829 - DNA, 108 bp, Artificial Sequence
  scaffold variant
tacggcgcttttatctcattactttgagagccatcaccagcgactatgtcgtatgggtaaagcgcttatttagtcggagagaaatccgataaataagaagcatcaaag

SEQ ID NO: 830 - DNA, 108 bp, Artificial Sequence
  scaffold variant
tactggcgcttttatctcgattactttgagagccatcaccagcgactatgtcgtatgggtaaagcgcttatttatctagagaaatccgataaataagaagcatcaaag

SEQ ID NO: 831 - DNA, 106 bp, Artificial Sequence
  scaffold variant
gctggcgcttttatctcattactttgagagccatcaccagcgactatgtcgtatgggtaaagcgcttatttatcgcgagaaatccgataaataagaagcatcaaag

SEQ ID NO: 832 - DNA, 106 bp, Artificial Sequence
  scaffold variant
tctggcgcttttatctcattactttgagagccatcaccagcgactatgtcgtatgggtaaagcgcttatttacggagagaaatccgataaataagaagcatcaaag

SEQ ID NO: 833 - DNA, 107 bp, Artificial Sequence
  scaffold variant
tactggcgcttttatctcattactttgagagccatcaccagcgactatgtcgtatgggtaaagcgcttatttatcgagagaaatccgataaataagaagcatcaaag

SEQ ID NO: 834 - DNA, 108 bp, Artificial Sequence
  scaffold variant
tactggcgcttttatcttcattactttgagagccatcaccagcgactatgtcgtatgggtaaagcgcttattttcggagagaaatccgataaataagaagcatcaaag

SEQ ID NO: 835 - DNA, 107 bp, Artificial Sequence
  scaffold variant
cctggcgcttttatctcattactttgagagccatcaccagcgactatgtcgtatgggtaaagcgcttatttatcggcgagaaatccgataaataagaagcatcaaag

SEQ ID NO: 836 - DNA, 110 bp, Artificial Sequence
  scaffold variant
tactggcgcttttatctcattactttgagagccatcaccagcgactatgtcgtattgggtaaagcgcttatttatcggagagaaatcccgataaataagaagcatcaaag

SEQ ID NO: 837 - DNA, 109 bp, Artificial Sequence
  scaffold variant
tactggcgcttttatctcattactttgagagccatcaccagcgactatgtcgtatgggtaaagcgcttatttatcaggagagaaatccgataaataagaagcatcaaag

SEQ ID NO: 838 - DNA, 108 bp, Artificial Sequence
  scaffold variant
cctggcgcttttatctgcattactttgagagccatcaccagcgactatgtcgtatgggtaaagcgcttatttatcggagagaaatccgataaataagaagcatcaaag

SEQ ID NO: 839 - DNA, 109 bp, Artificial Sequence; identical to SEQ ID NO: 518
  scaffold variant

SEQ ID NO: 840 - DNA, 108 bp, Artificial Sequence
  scaffold variant
tactggcgcttttatcctcattactttgagagccatcaccagcgactatgtcgtatgggtaaagcgcttatttatctagagaaatccgataaataagaagcatcaaag

SEQ ID NO: 841 - DNA, 110 bp, Artificial Sequence
  scaffold variant
ttactggcgcttttatctcattactttgagagccatcaccagcgactatgtcgtatgggtaaagcgcttatttatcggagagaaatcgcgataaataagaagcatcaaag

SEQ ID NO: 842 - DNA, 108 bp, Artificial Sequence
  scaffold variant
tctggcgcttttatcttcattactttgagagccatcaccagcgactatgtcgtatgggtaaagcgcttatttatcggagagaaatccgataaataagaagcatcaaag

SEQ ID NO: 843 - DNA, 108 bp, Artificial Sequence
  scaffold variant
actggcgcttttatctcattactttgagagccatcaccagcgactatgtcgtatgggtaaagcgcttatttactcggagagaaatccgataaataagaagcatcaaag

SEQ ID NO: 844 - DNA, 108 bp, Artificial Sequence
  scaffold variant
tactggcgcttttattctcattactttgagagccatcaccagcgactatgtcgtatgggtaaagcgcttatttgcggagagaaatccgataaataagaagcatcaaag

SEQ ID NO: 845 - DNA, 108 bp, Artificial Sequence
  scaffold variant
gctggcgcttttatctcattactttgagagccatcaccagcgactatgtcgtatgggtaaagcgcttatttactcggagagaaatccgataaataagaagcatcaaag

SEQ ID NO: 846 - DNA, 109 bp, Artificial Sequence; identical to SEQ ID NO: 740
  scaffold variant

SEQ ID NO: 847 - DNA, 108 bp, Artificial Sequence
  scaffold variant
tactggcgcttttaatctcattactttgagagccatcaccagcgactatgtcgtatgggtaaagcgcttatttatctagagaaatccgataaataagaagcatcaaag

SEQ ID NO: 848 - DNA, 106 bp, Artificial Sequence
  scaffold variant
tctggcgcttttatctcattactttgagagccatcaccagcgactatgtcgtatgggtaaagcgcttatttatcgtgagaaatccgataaataagaagcatcaaag

SEQ ID NO: 849 - DNA, 108 bp, Artificial Sequence
  scaffold variant
gctggcgcttttatctcattactttgagagccatcaccagcgactatgtcgtatgggtaaagcgcttatttatcgggagagaaatccgataaataagaagcatcaaag

SEQ ID NO: 850 - DNA, 106 bp, Artificial Sequence
  scaffold variant
tctggcgcttttatctcattactttgagagccatcaccagcgactatgtcgtatgggtaaagcgcttatttatcggagagaaatccgtaaataagaagcatcaaag

SEQ ID NO: 851 - DNA, 105 bp, Artificial Sequence
  scaffold variant
ctggcgcttttatctcattactttgagagccatcaccagcgactatgtcgtatgggtaaagcgcttattatcggagagaaatccgataaataagaagcatcaaag

SEQ ID NO: 852 - DNA, 109 bp, Artificial Sequence; identical to SEQ ID NO: 740
  scaffold variant

SEQ ID NO: 853 - DNA, 108 bp, Artificial Sequence
  scaffold variant
tactggcgcttttatctctattactttgagagccatcaccagcgactatgtcgtatgggtaaagcgcttatttatcaagagaaatccgataaataagaagcatcaaag

SEQ ID NO: 854 - DNA, 108 bp, Artificial Sequence
  scaffold variant
tactggcgcttttatctcattactttgtagagccatcaccagcgactatgtcgtatgggtaaagcgcttatttattgagagaaatccgataaataagaagcatcaaag

SEQ ID NO: 855 - DNA, 107 bp, Artificial Sequence
  scaffold variant
ctggcgcttttatctcattactttagagagccatcaccagcgactatgtcgtatgggtaaagcgcttatttatcggagagaaatccgataaataagaagcatcaaag

SEQ ID NO: 856 - DNA, 105 bp, Artificial Sequence
  scaffold variant
ctggcgcttttatctcattactttgagagccatcaccagcgactatgtcgtatgggtaaagcgcttatttatcgcgagaaatccgataaataagaagcatcaaag

SEQ ID NO: 857 - DNA, 105 bp, Artificial Sequence
  scaffold variant
tacggcgcttttatctcattactttgagagccatcaccagcgactatgtcgtatgggtaaagcgcttatttatcggagtaatccgataaataagaagcatcaaag

SEQ ID NO: 858 - DNA, 106 bp, Artificial Sequence
  scaffold variant
tacggcgcttttatctcattactttgagagccatcaccagcgactatgtcgtatgggtaaagcgcttatttatcgcgagaaatccgataaataagaagcatcaaag

SEQ ID NO: 859 - DNA, 108 bp, Artificial Sequence
  scaffold variant
gctggcgcttttatctcattactttgagagccatcaccagcgactatgtcgtatgggtaaagcgcttatttatcggagagaaatcgcgataaataagaagcatcaaag

SEQ ID NO: 860 - DNA, 105 bp, Artificial Sequence; identical to SEQ ID NO: 379
  scaffold variant

SEQ ID NO: 861 - DNA, 108 bp, Artificial Sequence
  scaffold variant
tacggcgcttttatctcattactttcgagagccatcaccagcgactatgtcgtatgggtaaagcgcttatttatcggagagaaatccgataaataagaagcatcaaag

SEQ ID NO: 862 - DNA, 106 bp, Artificial Sequence
  scaffold variant
tctggcgcttttatctcattactttgagagccatcaccagcgactatgtcgtatgggtaaagcgcttatttatcggaggaaatccgataaataagaagcatcaaag

SEQ ID NO: 863 - DNA, 109 bp, Artificial Sequence; identical to SEQ ID NO: 740
  scaffold variant

SEQ ID NO: 864 - DNA, 105 bp, Artificial Sequence
  scaffold variant
atggcgcttttatctcattactttgagagccatcaccagcgactatgtcgtatgggtaaagcgcttatttattgagagaaatccgataaataagaagcatcaaag

SEQ ID NO: 865 - DNA, 106 bp, Artificial Sequence
  scaffold variant
tctggcgcttttatctcattactttgagagccatcaccagcgactatgtcgtatgggtaaagcgcttatttatcggtagaaatccgataaataagaagcatcaaag

SEQ ID NO: 866 - DNA, 106 bp, Artificial Sequence
  scaffold variant
tacggcgcttttatctcattactttgagagccatcaccagcgactatgtcgtatgggtaaagcgcttatttatcggagaggatccgataaataagaagcatcaaag

SEQ ID NO: 867 - DNA, 105 bp, Artificial Sequence
  scaffold variant
gctggcgcttttatctcattactttgagagccatcaccagcgactatgtcgtatgggtaaagcgcttatttatcggagaaatccgataaataagaagcatcaaag

SEQ ID NO: 868 - DNA, 105 bp, Artificial Sequence
  scaffold variant
ctggcgcttttatctcattactttgagagccatcaccagcgactatgtcgtatgggtaaagcgcttatttatcggagagaaatccgtaaataagaagcatcaaag

SEQ ID NO: 869 - DNA, 107 bp, Artificial Sequence
  scaffold variant
actggcgcttttatctcattactttgagagccatcaccagcgactatgtcgtatgggtaaagcgcttatttctcggagagaaatccgataaataagaagcatcaaag

SEQ ID NO: 870 - DNA, 108 bp, Artificial Sequence
  scaffold variant
gctggcgcttttatctcattactttgagagccatcaccagcgactatgtcgtatgggtaaagcgcttatttatcggagagaaatcctgataaataagaagcatcaaag

SEQ ID NO: 871 - DNA, 104 bp, Artificial Sequence; identical to SEQ ID NO: 787
  scaffold variant

SEQ ID NO: 872 - DNA, 106 bp, Artificial Sequence
  scaffold variant
actggcgcttttatctcattactttgagagccatcaccagcgactatgtcgtatgggtaaagcgcttatttatcggaggaaatccgataaataagaagcatcaaag

SEQ ID NO: 873 - DNA, 106 bp, Artificial Sequence
  scaffold variant
tacggcgcttttatctcattactttgagagccatcaccagcgactatgtcgtatgggtaaagcgcttatttatcggagtaaatccgataaataagaagcatcaaag

SEQ ID NO: 874 - DNA, 110 bp, Artificial Sequence
  scaffold variant
tactggcgcttttattctcattactttgagagccatcaccagcgactatgtcgtatgggtaaagcgcttatttatcggcagagaaatccgataaataagaagcatcaaag

SEQ ID NO: 875 - DNA, 108 bp, Artificial Sequence
  scaffold variant
ttactggcgcttttatctcattactttgagagccatcaccagcgactatgtcgtatgggtaaagcgcttatttatctagagaaatccgataaataagaagcatcaaag

SEQ ID NO: 876 - DNA, 105 bp, Artificial Sequence
  scaffold variant
ctggcgcttttatctcattactttgagagccatcaccagcgactatgtcgtatgggtaaagcgcttatttatcggagcaaatccgataaataagaagcatcaaag

SEQ ID NO: 877 - DNA, 110 bp, Artificial Sequence
  scaffold variant
tactggcgcttttattctcattactttgagagccatcaccagcgactatgtcgtatgggtaaagcgcttatttatcggagagaaatccgcataaataagaagcatcaaag

SEQ ID NO: 878 - DNA, 108 bp, Artificial Sequence
  scaffold variant
gctggcgcttttatctcattactttgcagagccatcaccagcgactatgtcgtatgggtaaagcgcttatttatcggagagaaatccgataaataagaagcatcaaag

SEQ ID NO: 879 - DNA, 108 bp, Artificial Sequence
  scaffold variant
tactggcgcttttatctcgattactttgagagccatcaccagcgactatgtcgtatgggtaaagcgcttatttatcgagagaaatccgataaataagaagcatcaaag

SEQ ID NO: 880 - DNA, 105 bp, Artificial Sequence
  scaffold variant
ctggcgcttttatctcattactttgagagccatcaccagcgactatgtcgtatgggtaaagcgcttatttatccagagaaatccgataaataagaagcatcaaag

SEQ ID NO: 881 - DNA, 106 bp, Artificial Sequence
  scaffold variant
tacggcgcttttatctcattactttgagagccatcaccagcgactatgtcgtatgggtaaagcgcttattttcggagagaaatccgataaataagaagcatcaaag

SEQ ID NO: 882 - DNA, 110 bp, Artificial Sequence
  scaffold variant
tactggcgcttttatcctcattactttgagagccatcaccagcgactatgtcgtatgggtaaagcgcttatttatcggagagaaatctcgataaataagaagcatcaaag

SEQ ID NO: 883 - DNA, 107 bp, Artificial Sequence
  scaffold variant
cctggcgcttttatctcattactttgagagccatcaccagcgactatgtcgtatgggtaaagcgcttatttatcggagagaaatcagataaataagaagcatcaaag

SEQ ID NO: 884 - DNA, 108 bp, Artificial Sequence
  scaffold variant
tctggcgcttttatctcattactttgagagccatcaccagcgactatgtcgtatgggtaaagcgcttatttatcggagagaaatcccgataaataagaagcatcaaag

SEQ ID NO: 885 - DNA, 106 bp, Artificial Sequence
  scaffold variant
tctggcgcttttatctcattactttgagagccatcaccagcgactatgtcgtatgggtaaagcgcttatttatcggagcaaatccgataaataagaagcatcaaag

SEQ ID NO: 886 - DNA, 110 bp, Artificial Sequence
  scaffold variant
tactggcgcttttatcttcattactttgagagccatcaccagcgactatgtcgtatgggtaaagcgcttatttatcgcgagagaaatccgataaataagaagcatcaaag

SEQ ID NO: 887 - DNA, 108 bp, Artificial Sequence
  scaffold variant
actggcgcttttatctcattactttgagagccatcaccagcgactatgtcgtatgggtaaagcgcttatttatcggagagaaaatccgataaataagaagcatcaaag

SEQ ID NO: 888 - DNA, 106 bp, Artificial Sequence
  scaffold variant
tctggcgcttttatctcattactttgagagccatcaccagcgactatgtcgtatgggtaaagcgcttatttatcggagagaaatccggaaataagaagcatcaaag

SEQ ID NO: 889 - DNA, 106 bp, Artificial Sequence
  scaffold variant
cctggcgcttttatctcattactttgagagccatcaccagcgactatgtcgtatgggtaaagcgcttatttatcggagagactccgataaataagaagcatcaaag

SEQ ID NO: 890 - DNA, 106 bp, Artificial Sequence
  scaffold variant
tacggcgcttttatctcattactttgagagccatcaccagcgactatgtcgtatgggtaaagcgttatttatcggagagaaatccgataaataagaagcatcaaag

SEQ ID NO: 891 - DNA, 105 bp, Artificial Sequence
  scaffold variant
ctggcgcttttatctcattactttgagagccatcaccagcgactatgtcgtatgggtaaagcgcttatttatcggagagaaaacgataaataagaagcatcaaag

SEQ ID NO: 892 - DNA, 108 bp, Artificial Sequence
  scaffold variant
gctggcgcttttatctcattactttgagagccatcaccagcgactatgtcgtatgggtaaagcgcttatttatccggagagaaatccgataaataagaagcatcaaag

SEQ ID NO: 893 - DNA, 110 bp, Artificial Sequence
  scaffold variant
tactggcgcttttatctcattactttgagagccatcaccagcgactatgtcgtagtgggtaaagcgcttatttatcgggagagaaatccgataaataagaagcatcaaag

SEQ ID NO: 894 - DNA, 108 bp, Artificial Sequence
  scaffold variant
tactggcgcttttatctgcattactttgagagccatcaccagcgactatgtcgtatgggtaaagcgcttatttatcggagataatccgataaataagaagcatcaaag

SEQ ID NO: 895 - DNA, 110 bp, Artificial Sequence
  scaffold variant
tactggcgcttttatcctcattactttgagagccatcaccagcgactatgtcgtatgggtaaagcgcttatttatctggagagaaatccgataaataagaagcatcaaag

SEQ ID NO: 896 - DNA, 108 bp, Artificial Sequence
  scaffold variant
tacggcgcttttatctcattactttagagagccatcaccagcgactatgtcgtatgggtaaagcgcttatttatcggagagaaatccgataaataagaagcatcaaag

SEQ ID NO: 897 - DNA, 110 bp, Artificial Sequence
  scaffold variant
tactggcgcttttatcttcattactttgagagccatcaccagcgactatgtcgtatgggtaaagcgcttatttatcggagagaaatcctgataaataagaagcatcaaag

SEQ ID NO: 898 - DNA, 108 bp, Artificial Sequence
  scaffold variant
tactggcgcttttatcctcattactttgagagccatcaccagcgactatgtcgtatgggtaaagcgcttatttatggagagaaatccgataaataagaagcatcaaag

SEQ ID NO: 899 - DNA, 106 bp, Artificial Sequence
  scaffold variant
tacggcgcttttatctcattactttgagagccatcaccagcgactatgtcgtatgggtaaagcgcttatttatcggagagaaatccctaaataagaagcatcaaag

SEQ ID NO: 900 - DNA, 106 bp, Artificial Sequence
  scaffold variant
tctggcgcttttatctcattactttgagagccatcaccagcgactatgtcgtatgggtaaagcgttatttatcggagagaaatccgataaataagaagcatcaaag

SEQ ID NO: 901 - DNA, 110 bp, Artificial Sequence
  scaffold variant
tactggcgcttttatctcattactttcgagagccatcaccagcgactatgtcgtatgggtaaagcgcttatttatcgagagagaaatccgataaataagaagcatcaaag

SEQ ID NO: 902 - DNA, 108 bp, Artificial Sequence
  scaffold variant
tactggcgcttttatcttcattactttgagagccatcaccagcgactatgtcgtatgggtaaagcgcttatttgcggagagaaatccgataaataagaagcatcaaag

SEQ ID NO: 903 - DNA, 107 bp, Artificial Sequence; identical to SEQ ID NO: 507
  scaffold variant

SEQ ID NO: 904 - DNA, 108 bp, Artificial Sequence
  scaffold variant
gctggcgcttttatctcattactttgagagccatcaccagcgactatgtcgtatgggtaaagcgcttatttattcggagagaaatccgataaataagaagcatcaaag

SEQ ID NO: 905 - DNA, 108 bp, Artificial Sequence
  scaffold variant
tactggcgcttttatcatcattactttgagagccatcaccagcgactatgtcgtatgggtaaagcgcttatttatcgagagaaatccgataaataagaagcatcaaag

SEQ ID NO: 906 - DNA, 107 bp, Artificial Sequence
  scaffold variant
ctggcgcttttatctcattactttgagagccatcaccagcgactatgtcgtatgggtaaagcgcttatttatcggagagaaatccgcataaataagaagcatcaaag

SEQ ID NO: 907 - DNA, 110 bp, Artificial Sequence
  scaffold variant
tactggcgcttttatctcgattactttgagagccatcaccagcgactatgtcgtatgggtaaagcgcttatttatacggagagaaatccgataaataagaagcatcaaag

SEQ ID NO: 908 - DNA, 106 bp, Artificial Sequence
  scaffold variant
tctggcgcttttatctcattactttgagagccatcaccagcgactatgtcgtatgggtaaagcgcttatttatcggagtaaatccgataaataagaagcatcaaag

SEQ ID NO: 909 - DNA, 105 bp, Artificial Sequence
  scaffold variant
ctggcgcttttatctcattactttgagagccatcaccagcgactatgtcgtatgggtaaagcgcttatttatggagagaaatccgataaataagaagcatcaaag

SEQ ID NO: 910 - DNA, 109 bp, Artificial Sequence
  scaffold variant
tactggcgcttttatctcattactttgagagccatcaccagcgactatgtcgtatgggtaaagcgcttatttatctggagagaaatccgataaataagaagcatcaaag

SEQ ID NO: 911 - DNA, 108 bp, Artificial Sequence
  scaffold variant
actggcgcttttatctcattactttagagagccatcaccagcgactatgtcgtatgggtaaagcgcttatttatcggagagaaatccgataaataagaagcatcaaag

SEQ ID NO: 912 - DNA, 109 bp, Artificial Sequence
  scaffold variant
tactggcgcttttatctcattactttgagagccatcaccagcgactatgtcgtatgggtaaagcgcttatttattcggagagaaatccgataaataagaagcatcaaag

SEQ ID NO: 913 - DNA, 106 bp, Artificial Sequence
  scaffold variant
tacggcgcttttatctcattactttgagagccatcaccagcgactatgtcgtatgggtaaagctttatttatcggagagaaatccgataaataagaagcatcaaag

SEQ ID NO: 914 - DNA, 106 bp, Artificial Sequence
  scaffold variant
tctggcgcttttatctcattactttgagagccatcaccagcgactatgtcgtatgggtaaagcgcttatttatggagagaaatccgataaataagaagcatcaaag

SEQ ID NO: 915 - DNA, 107 bp, Artificial Sequence
  scaffold variant
tactggcgcttttatctcattactttgagagccatcaccagcgactatgtcgtatgggtaaagcgcttatttatccagagaaatccgataaataagaagcatcaaag

SEQ ID NO: 916 - DNA, 108 bp, Artificial Sequence
  scaffold variant
actggcgcttttatctctattactttgagagccatcaccagcgactatgtcgtatgggtaaagcgcttatttatcggagagaaatccgataaataagaagcatcaaag

SEQ ID NO: 917 - DNA, 106 bp, Artificial Sequence
  scaffold variant
gctggcgcttttatctcattactttgagagccatcaccagcgactatgtcgtatgggtaaagcgcttatttatcggagagaaatccctaaataagaagcatcaaag

SEQ ID NO: 918 - DNA, 108 bp, Artificial Sequence
  scaffold variant
tactggcgcttttatctcgattactttgagagccatcaccagcgactatgtcgtatgggtaaagcgcttatttatcaagagaaatccgataaataagaagcatcaaag

SEQ ID NO: 919 - DNA, 108 bp, Artificial Sequence
  scaffold variant
gctggcgcttttatcttcattactttgagagccatcaccagcgactatgtcgtatgggtaaagcgcttatttatcggagagaaatccgataaataagaagcatcaaag

SEQ ID NO: 920 - DNA, 106 bp, Artificial Sequence
  scaffold variant
actggcgcttttatctcattactttgagagccatcaccagcgactatgtcgtatgggtaaagcgcttatttatcggcagaaatccgataaataagaagcatcaaag

SEQ ID NO: 921 - DNA, 107 bp, Artificial Sequence
  scaffold variant
ctggcgcttttatctcattactttgagagccatcaccagcgactatgtcgtatgggtaaagcgcttatttatcggagagaaatccgataaataagagagcatcaaag

SEQ ID NO: 922 - DNA, 110 bp, Artificial Sequence
  scaffold variant
tactggcgcttttatctcattactttcgagagccatcaccagcgactatgtcgtatgggtaaagcgcttattttatcggagagaaatccgataaataagaagcatcaaag

SEQ ID NO: 923 - DNA, 106 bp, Artificial Sequence
  scaffold variant
tacggcgcttttatctcattactttgagagccatcaccagcgactatgtcgtatgggtaaagcgcttatttatggagagaaatccgataaataagaagcatcaaag

SEQ ID NO: 924 - DNA, 106 bp, Artificial Sequence
  scaffold variant
cctggcgcttttatctcattactttgagagccatcaccagcgactatgtcgtatgggtaaagcgcttatttatcggagagaaatggataaataagaagcatcaaag

SEQ ID NO: 925 - DNA, 107 bp, Artificial Sequence
  scaffold variant
ctggcgcttttatctcattactttgagagccatcaccagcgactatgtcgtatgggtaaagcgcttatttattcggagagaaatccgataaataagaagcatcaaag

SEQ ID NO: 926 - DNA, 110 bp, Artificial Sequence
  scaffold variant
tactggcgcttttatctgcattactttgagagccatcaccagcgactatgtcgtatgggtaaagcgcttatttatcggcagagaaatccgataaataagaagcatcaaag

SEQ ID NO: 927 - DNA, 108 bp, Artificial Sequence
  scaffold variant
tacggcgcttttatctcattactttgagagccatcaccagcgactatgtcgtatgggtaaagcgcttatttattcggagagaaatccgataaataagaagcatcaaag

SEQ ID NO: 928 - DNA, 107 bp, Artificial Sequence
  scaffold variant
tacggcgcttttatctcattactttgagagccatcaccagcgactatgtcgtatgggtaaagcgcttatttatcggggagaaatccgataaataagaagcatcaaag

SEQ ID NO: 929 - DNA, 106 bp, Artificial Sequence
  scaffold variant
tctggcgcttttatctcattactttgagagccatcaccagcgactatgtcgtatgggtaaagcgcttatttatcgcgagaaatccgataaataagaagcatcaaag

SEQ ID NO: 930 - DNA, 106 bp, Artificial Sequence
  scaffold variant
cctggcgcttttatctcattactttgagagccatcaccagcgactatgtcgtatgggtaaagcgcttatttatcggagagaaatccgaaaataagaagcatcaaag

SEQ ID NO: 931 - DNA, 108 bp, Artificial Sequence
  scaffold variant
tactggcgcttttatctcattactttcgagagccatcaccagcgactatgtcgtatgggtaaagcgcttatttatcggagagaaatccataaataagaagcatcaaag

SEQ ID NO: 932 - DNA, 106 bp, Artificial Sequence
  scaffold variant
tacggcgcttttatctcattactttgagagccatcaccagcgactatgtcgtatgggtaaagcgcttatttatcggagagtatccgataaataagaagcatcaaag

SEQ ID NO: 933 - DNA, 106 bp, Artificial Sequence
  scaffold variant
gctggcgcttttatctcattactttgagagccatcaccagcgactatgtcgtatgggtaaagcgcttatttccggagagaaatccgataaataagaagcatcaaag

SEQ ID NO: 934 - DNA, 106 bp, Artificial Sequence
  scaffold variant
tacggcgcttttatctcattactttgagagccatcaccagcgactatgtcgtatgggtaaagcgcttatttatcggaggaaatccgataaataagaagcatcaaag

SEQ ID NO: 935 - DNA, 105 bp, Artificial Sequence
  scaffold variant
actggcgcttttatctcattactttgagagccatcaccagcgactatgtcgtatgggtaaagcgcttatttatcggggaaatccgataaataagaagcatcaaag

SEQ ID NO: 936 - DNA, 110 bp, Artificial Sequence
  scaffold variant
tactggcgcttttatcctcattactttgagagccatcaccagcgactatgtcgtatgggtaaagcgcttatttactcggagagaaatccgataaataagaagcatcaaag

SEQ ID NO: 937 - DNA, 105 bp, Artificial Sequence
  scaffold variant
cctggcgcttttatctcattactttgagagccatcaccagcgactatgtcgtatgggtaaagcgcttatttatcggagagacccgataaataagaagcatcaaag

SEQ ID NO: 938 - DNA, 110 bp, Artificial Sequence
  scaffold variant
tactggcgcttttatctcattactttcgagagccatcaccagcgactatgtcgtatgggtaaagcgcttatttatctggagagaaatccgataaataagaagcatcaaag

SEQ ID NO: 939 - DNA, 106 bp, Artificial Sequence
  scaffold variant
gctggcgcttttatctcattactttgagagccatcaccagcgactatgtcgtatgggtaaagcgcttatttatcggagagaaaacgataaataagaagcatcaaag

SEQ ID NO: 940 - DNA, 109 bp, Artificial Sequence; identical to SEQ ID NO: 740
  scaffold variant

SEQ ID NO: 941 - DNA, 109 bp, Artificial Sequence
  scaffold variant
tactggcgcttttatctcattactttgagagccatcaccagcgactatgtcgtatgggtaaagcgcttatttatcggagagaaatcacgataaataagaagcatcaaag

SEQ ID NO: 942 - DNA, 110 bp, Artificial Sequence
  scaffold variant
ctactggcgcttttatctcattactttgagagccatcaccagcgactatgtcgtatgggtaaagcgcttatttatcggcagagaaatccgataaataagaagcatcaaag

SEQ ID NO: 943 - DNA, 108 bp, Artificial Sequence
  scaffold variant
cctggcgcttttatctcattactttgagagccatcaccagcgactatgtcgtatgggtaaagcgcttatttaatcggagagaaatccgataaataagaagcatcaaag

SEQ ID NO: 944 - DNA, 108 bp, Artificial Sequence
  scaffold variant
tactggcgcttttaatctcattactttgagagccatcaccagcgactatgtcgtatgggtaaagcgcttatttatcggagagaaatccataaataagaagcatcaaag

SEQ ID NO: 945 - DNA, 110 bp, Artificial Sequence
  scaffold variant
tactggcgcttttattctcattactttgagagccatcaccagcgactatgtcgtattgggtaaagcgcttatttatcggagagaaatccgataaataagaagcatcaaag

SEQ ID NO: 946 - DNA, 104 bp, Artificial Sequence
  scaffold variant
tggcgcttttatctcattactttgagagccatcaccagcgactatgtcgtatgggtaaagcgcttatttatccagagaaatccgataaataagaagcatcaaag

SEQ ID NO: 947 - DNA, 109 bp, Artificial Sequence
  scaffold variant
tactggcgcttttatctcattactttgagagccatcaccagcgactatgtcgtatgggtaaagcgcttatttactcggagagaaatccgataaataagaagcatcaaag

SEQ ID NO: 948 - DNA, 109 bp, Artificial Sequence
  scaffold variant
tactggcgcttttatctcattactttgagagccatcaccagcgactatgtcgtattgggtaaagcgcttatttatcggagagaaatccgataaataagaagcatcaaag

SEQ ID NO: 949 - DNA, 108 bp, Artificial Sequence
  scaffold variant
actggcgcttttatctcattactttgcagagccatcaccagcgactatgtcgtatgggtaaagcgcttatttatcggagagaaatccgataaataagaagcatcaaag

SEQ ID NO: 950 - DNA, 105 bp, Artificial Sequence
  scaffold variant
ctggcgcttttatctcattactttgagagccatcaccagcgactatgtcgtatgggtaaagcgcttatttatcggagagaaatccgaaaataagaagcatcaaag

SEQ ID NO: 951 - DNA, 110 bp, Artificial Sequence
  scaffold variant
tactggcgcttttatctcattactttgagagccatcaccagcgactatgtcgtagtgggtaaagcgcttatttatcggagagaaatcgcgataaataagaagcatcaaag

SEQ ID NO: 952 - DNA, 108 bp, Artificial Sequence
  scaffold variant
tacggcgcttttatctcattactttgagagccatcaccagcgactatgtcgtatgggtaaagcgcttatttatcggtagagaaatccgataaataagaagcatcaaag

SEQ ID NO: 953 - DNA, 108 bp, Artificial Sequence
  scaffold variant
tactggcgcttttatctcattactttgagagccatcaccagcgactatgtcgtatgggtaaagcgcttatttatcggagagaaatccggtaaataagaagcatcaaag

SEQ ID NO: 954 - DNA, 106 bp, Artificial Sequence
  scaffold variant
actggcgcttttatctcattactttgagagccatcaccagcgactatgtcgtatgggtaaagcgcttatttatcggagagaaaacgataaataagaagcatcaaag

SEQ ID NO: 955 - DNA, 105 bp, Artificial Sequence; identical to SEQ ID NO: 545
  scaffold variant

SEQ ID NO: 956 - DNA, 110 bp, Artificial Sequence
  scaffold variant
tactggcgcttttatctgcattactttgagagccatcaccagcgactatgtcgtatgggtaaagcgcttatttattcggagagaaatccgataaataagaagcatcaaag

SEQ ID NO: 957 - DNA, 108 bp, Artificial Sequence
  scaffold variant
tacggcgcttttatctcattactttgagagccatcaccagcgactatgtcgtatgggtaaagcgcttattatatcggagagaaatccgataaataagaagcatcaaag

SEQ ID NO: 958 - DNA, 107 bp, Artificial Sequence
  scaffold variant
atggcgcttttatctcattactttgagagccatcaccagcgactatgtcgtatgggtaaagcgcttatttatccggagagaaatccgataaataagaagcatcaaag

SEQ ID NO: 959 - DNA, 105 bp, Artificial Sequence
  scaffold variant
ctggcgcttttatctcattactttgagagccatcaccagcgactatgtcgtatgggtaaagcgcttatttgcggagagaaatccgataaataagaagcatcaaag

SEQ ID NO: 960 - DNA, 108 bp, Artificial Sequence
  scaffold variant
ttactggcgcttttatctcattactttgagagccatcaccagcgactatgtcgtatgggtaaagcgcttattttcggagagaaatccgataaataagaagcatcaaag

SEQ ID NO: 961 - DNA, 106 bp, Artificial Sequence; identical to SEQ ID NO: 509
  scaffold variant

SEQ ID NO: 962 - DNA, 108 bp, Artificial Sequence
  scaffold variant
tactggcgcttttatctcattactttgagagccatcaccagcgactatgtcgtagtgggtaaagcgcttatttatcggagagaaatcgataaataagaagcatcaaag

SEQ ID NO: 963 - DNA, 110 bp, Artificial Sequence
  scaffold variant
tactggcgcttttatctctattactttgagagccatcaccagcgactatgtcgtatgggtaaagcgcttatttactcggagagaaatccgataaataagaagcatcaaag

SEQ ID NO: 964 - DNA, 105 bp, Artificial Sequence
  scaffold variant
cctggcgcttttatctcattactttgagagccatcaccagcgactatgtcgtatgggtaaagcgcttatttatcggagatatccgataaataagaagcatcaaag

SEQ ID NO: 965 - DNA, 108 bp, Artificial Sequence
  scaffold variant
tctggcgcttttatctcattactttgagagccatcaccagcgactatgtcgtatgggtaaagcgcttattgtatcggagagaaatccgataaataagaagcatcaaag

SEQ ID NO: 966 - DNA, 105 bp, Artificial Sequence
  scaffold variant
cctggcgcttttatctcattactttgagagccatcaccagcgactatgtcgtatgggtaaagcgcttatttatcggcgaaatccgataaataagaagcatcaaag

SEQ ID NO: 967 - DNA, 107 bp, Artificial Sequence
  scaffold variant
actggcgcttttatctcattactttgagagccatcaccagcgactatgtcgtatgggtaaagcgcttatttatcggcgagaaatccgataaataagaagcatcaaag

SEQ ID NO: 968 - DNA, 108 bp, Artificial Sequence
  scaffold variant
tactggcgcttttatctcgattactttgagagccatcaccagcgactatgtcgtatgggtaaagcgcttatttatcggagataatccgataaataagaagcatcaaag

SEQ ID NO: 969 - DNA, 106 bp, Artificial Sequence
  scaffold variant
tacggcgcttttatctcattactttgagagccatcaccagcgactatgtcgtatgggtaaagcgcttatttatcggagagaaaacgataaataagaagcatcaaag

SEQ ID NO: 970 - DNA, 110 bp, Artificial Sequence
  scaffold variant
tactggcgcttttatcatcattactttgagagccatcaccagcgactatgtcgtatgggtaaagcgcttatttatccggagagaaatccgataaataagaagcatcaaag

SEQ ID NO: 971 - DNA, 108 bp, Artificial Sequence
  scaffold variant
tactggcgcttttatctcattactttgagagccatcaccagcgactatgtcgtatgggtaaagcgcttatttatcggagagaaatcagataaataagaagcatcaaag

SEQ ID NO: 972 - DNA, 107 bp, Artificial Sequence
  scaffold variant
tactggcgcttttatctcattactttgagagccatcaccagcgactatgtcgtatgggtaaagcgcttatttatcgggagaaatccgataaataagaagcatcaaag

SEQ ID NO: 973 - DNA, 107 bp, Artificial Sequence; identical to SEQ ID NO: 833
  scaffold variant

SEQ ID NO: 974 - DNA, 108 bp, Artificial Sequence
  scaffold variant
tactggcgcttttattctcattactttgagagccatcaccagcgactatgtcgtatgggtaaagcgcttatttatcggaggaaatccgataaataagaagcatcaaag

SEQ ID NO: 975 - DNA, 107 bp, Artificial Sequence
  scaffold variant
cctggcgcttttatctcattactttgagagccatcaccagcgactatgtcgtatgggtaaagcgcttatttatcggagagaaattcgataaataagaagcatcaaag

SEQ ID NO: 976 - DNA, 107 bp, Artificial Sequence; identical to SEQ ID NO: 833
  scaffold variant

SEQ ID NO: 977 - DNA, 108 bp, Artificial Sequence
  scaffold variant
tctggcgcttttatcctcattactttgagagccatcaccagcgactatgtcgtatgggtaaagcgcttatttatcggagagaaatccgataaataagaagcatcaaag

SEQ ID NO: 978 - DNA, 106 bp, Artificial Sequence
  scaffold variant
tacggcgcttttatctcattactttgagagccatcaccagcgactatgtcgtatgggtaaagcgcttatttatcggagagcatccgataaataagaagcatcaaag

SEQ ID NO: 979 - DNA, 110 bp, Artificial Sequence
  scaffold variant
tactggcgcttttattctcattactttgagagccatcaccagcgactatgtcgtatgggtaaagcgcttatttatcggagagaaatcctgataaataagaagcatcaaag

SEQ ID NO: 980 - DNA, 109 bp, Artificial Sequence
  scaffold variant
tactggcgcttttatctcattactttgagagccatcaccagcgactatgtcgtatgggtaaagcgcttatttatccggagagaaatccgataaataagaagcatcaaag

SEQ ID NO: 981 - DNA, 106 bp, Artificial Sequence
  scaffold variant
cctggcgcttttatctcattactttgagagccatcaccagcgactatgtcgtatgggtaaagcgcttatttatcggagagaagccgataaataagaagcatcaaag

SEQ ID NO: 982 - DNA, 104 bp, Artificial Sequence; identical to SEQ ID NO: 721
  scaffold variant

SEQ ID NO: 983 - DNA, 108 bp, Artificial Sequence
  scaffold variant
tctggcgcttttatctcattactttgagagccatcaccagcgactatgtcgtatgggtaaagcgcttatttatcggagagaaatccgcataaataagaagcatcaaag

SEQ ID NO: 984 - DNA, 108 bp, Artificial Sequence
  scaffold variant
cctggcgcttttatctcgattactttgagagccatcaccagcgactatgtcgtatgggtaaagcgcttatttatcggagagaaatccgataaataagaagcatcaaag

SEQ ID NO: 985 - DNA, 107 bp, Artificial Sequence; identical to SEQ ID NO: 833
  scaffold variant

SEQ ID NO: 986 - DNA, 108 bp, Artificial Sequence
  scaffold variant
cctggcgcttttatctcattactttgagagccatcaccagcgactatgtcgtatgggtaaagcgcttatttatcggagaggaaatccgataaataagaagcatcaaag

SEQ ID NO: 987 - DNA, 109 bp, Artificial Sequence; identical to SEQ ID NO: 740
  scaffold variant

SEQ ID NO: 988 - DNA, 106 bp, Artificial Sequence
  scaffold variant
tggcgcttttatctcattactttgagagccatcaccagcgactatgtcgtatgggtaaagcgcttatttatcggagagaaatcccgataaataagaagcatcaaag

SEQ ID NO: 989 - DNA, 104 bp, Artificial Sequence
  scaffold variant
tggcgcttttatctcattactttgagagccatcaccagcgactatgtcgtatgggtaaagcgcttatttatggagagaaatccgataaataagaagcatcaaag

SEQ ID NO: 990 - DNA, 107 bp, Artificial Sequence
  scaffold variant
tactggcgcttttatctcattactttgagagccatcaccagcgactatgtcgtatgggtaaagcgcttatttatcaagagaaatccgataaataagaagcatcaaag

SEQ ID NO: 991 - DNA, 110 bp, Artificial Sequence
  scaffold variant
tactggcgcttttatctcattactttgagagccatcaccagcgactatgtcgtatgggtaaagcgcttatttatacggagagaaatcccgataaataagaagcatcaaag

SEQ ID NO: 992 - DNA, 110 bp, Artificial Sequence
  scaffold variant
tactggcgcttttatctgcattactttgagagccatcaccagcgactatgtcgtatgggtaaagcgcttattatatcggagagaaatccgataaataagaagcatcaaag

SEQ ID NO: 993 - DNA, 106 bp, Artificial Sequence
  scaffold variant
tacggcgcttttatctcattactttgagagccatcaccagcgactatgtcgtatgggtaaagcgcttatttatcggagacaatccgataaataagaagcatcaaag

SEQ ID NO: 994 - DNA, 108 bp, Artificial Sequence
  scaffold variant
tactggcgcttttatctcattactttgagagccatcaccagcgactatgtcgtatgggtaaagcgcttatttatccggagagaaatccataaataagaagcatcaaag

SEQ ID NO: 995 - DNA, 108 bp, Artificial Sequence
  scaffold variant
tacggcgcttttatctcattactttgagagccatcaccagcgactatgtcgtatgggtaaagcgcttattttatcggagagaaatccgataaataagaagcatcaaag

SEQ ID NO: 996 - DNA, 110 bp, Artificial Sequence
  scaffold variant
tactggcgcttttatctcattactttagagagccatcaccagcgactatgtcgtatgggtaaagcgcttatttatcaggagagaaatccgataaataagaagcatcaaag

SEQ ID NO: 997 - DNA, 108 bp, Artificial Sequence
  scaffold variant
tactggcgcttttatcgtcattactttgagagccatcaccagcgactatgtcgtatgggtaaagcgcttatttatctagagaaatccgataaataagaagcatcaaag

SEQ ID NO: 998 - DNA, 105 bp, Artificial Sequence
  scaffold variant
ctggcgcttttatctcattactttgagagccatcaccagcgactatgtcgtatgggtaaagcgcttatttatcggagagtatccgataaataagaagcatcaaag

SEQ ID NO: 999 - DNA, 110 bp, Artificial Sequence
  scaffold variant
tactggcgcttttatcttcattactttgagagccatcaccagcgactatgtcgtatgggtaaagcgcttatcttatcggagagaaatccgataaataagaagcatcaaag

SEQ ID NO: 1000 - DNA, 109 bp, Artificial Sequence
  scaffold variant
tactggcgcttttatctcattactttgagagccatcaccagcgactatgtcgtatgggtaaagcgcttatttatgaggagagaaatccgataaataagaagcatcaaag

SEQ ID NO: 1001 - DNA, 106 bp, Artificial Sequence
  scaffold variant
tggcgcttttatctcattactttgagagccatcaccagcgactatgtcgtatgggtaaagcgcttatttattcggagagaaatccgataaataagaagcatcaaag

SEQ ID NO: 1002 - DNA, 105 bp, Artificial Sequence
  scaffold variant
cctggcgcttttatctcattactttgagagccatcaccagcgactatgtcgtatgggtaaagcgcttatttatcggggaaatccgataaataagaagcatcaaag

SEQ ID NO: 1003 - DNA, 110 bp, Artificial Sequence
  scaffold variant
ttactggcgcttttatctcattactttcgagagccatcaccagcgactatgtcgtatgggtaaagcgcttatttatcggagagaaatccgataaataagaagcatcaaag

SEQ ID NO: 1004 - DNA, 109 bp, Artificial Sequence
  scaffold variant
tactggcgcttttatctcattactttgagagccatcaccagcgactatgtcgtatgggtaaagcgcttatttatcggagagaaatccgcataaataagaagcatcaaag

SEQ ID NO: 1005 - DNA, 107 bp, Artificial Sequence
  scaffold variant
ctggcgcttttatctcattactttgagagccatcaccagcgactatgtcgtatgggtaaagcgcttatttactcggagagaaatccgataaataagaagcatcaaag

SEQ ID NO: 1006 - DNA, 108 bp, Artificial Sequence
  scaffold variant
tactggcgcttttatctctattactttgagagccatcaccagcgactatgtcgtatgggtaaagcgcttatttatcgagagaaatccgataaataagaagcatcaaag

SEQ ID NO: 1007 - DNA, 106 bp, Artificial Sequence
  scaffold variant
tacggcgcttttatctcattactttgagagccatcaccagcgactatgtcgtatgggtaaagcgcttatttatcggagagaaatagataaataagaagcatcaaag

SEQ ID NO: 1008 - DNA, 105 bp, Artificial Sequence; identical to SEQ ID NO: 998
  scaffold variant

SEQ ID NO: 1009 - DNA, 107 bp, Artificial Sequence
  scaffold variant
cctggcgcttttatctcattactttgagagccatcaccagcgactatgtcgtatgggtaaagcgcttatttatcgtagagaaatccgataaataagaagcatcaaag

SEQ ID NO: 1010 - DNA, 109 bp, Artificial Sequence
  scaffold variant
tactggcgcttttatctcattactttgagagccatcaccagcgactatgtcgtatgggtaaagcgcttatttatacggagagaaatccgataaataagaagcatcaaag

SEQ ID NO: 1011 - DNA, 108 bp, Artificial Sequence
  scaffold variant
tacggcgcttttatctcattactttgagagccatcaccagcgactatgtcgtatgggtaaagcgcttatttatcgcgagagaaatccgataaataagaagcatcaaag

SEQ ID NO: 1012 - DNA, 107 bp, Artificial Sequence
  scaffold variant
ctggcgcttttatctcattactttgagagccatcaccagcgactatgtcgtatgggtaaagcgcttatttatcggtagagaaatccgataaataagaagcatcaaag

SEQ ID NO: 1013 - DNA, 106 bp, Artificial Sequence
  scaffold variant
actggcgcttttatctcattactttgagagccatcaccagcgactatgtcgtatgggtaaagcgcttattttcggagagaaatccgataaataagaagcatcaaag

SEQ ID NO: 1014 - DNA, 105 bp, Artificial Sequence
  scaffold variant
actggcgcttttatctcattactttgagagccatcaccagcgactatgtcgtatgggtaaagcgcttatttatcagagaaatccgataaataagaagcatcaaag

SEQ ID NO: 1015 - DNA, 107 bp, Artificial Sequence
  scaffold variant
atggcgcttttatctcattactttgagagccatcaccagcgactatgtcgtatgggtaaagcgcttatttattcggagagaaatccgataaataagaagcatcaaag

SEQ ID NO: 1016 - DNA, 108 bp, Artificial Sequence
  scaffold variant
tactggcgcttttatctcattactttgagagccatcaccagcgactatgtcgtatgggtaaagcgcttatttatgcggagagaaatcgataaataagaagcatcaaag

SEQ ID NO: 1017 - DNA, 109 bp, Artificial Sequence
  scaffold variant
tactggcgcttttatctcattactttgagagccatcaccagcgactatgtcgtatgggtaaagcgcttatttatcggagagaaatcctgataaataagaagcatcaaag

SEQ ID NO: 1018 - DNA, 108 bp, Artificial Sequence
  scaffold variant
ctactggcgcttttatctcattactttgagagccatcaccagcgactatgtcgtatgggtaaagcgcttatttatcgggagaaatccgataaataagaagcatcaaag

SEQ ID NO: 1019 - DNA, 108 bp, Artificial Sequence
  scaffold variant
tactggcgcttttatctattactttgagagccatcaccagcgactatgtcgtatgggtaaagcgcttatttatacggagagaaatccgataaataagaagcatcaaag

SEQ ID NO: 1020 - DNA, 107 bp, Artificial Sequence; identical to SEQ ID NO: 833
  scaffold variant

SEQ ID NO: 1021 - DNA, 107 bp, Artificial Sequence
  scaffold variant
tacggcgcttttatctcattactttgagagccatcaccagcgactatgtcgtatgggtaaagcgcttatttatcggcgagaaatccgataaataagaagcatcaaag

SEQ ID NO: 1022 - DNA, 109 bp, Artificial Sequence; identical to SEQ ID NO: 740
  scaffold variant

SEQ ID NO: 1023 - DNA, 106 bp, Artificial Sequence
  scaffold variant
gctggcgcttttatctcattactttgagagccatcaccagcgactatgtcgtatgggtaaagcgcttatttattgagagaaatccgataaataagaagcatcaaag

SEQ ID NO: 1024 - DNA, 109 bp, Artificial Sequence; identical to SEQ ID NO: 740
  scaffold variant

SEQ ID NO: 1025 - DNA, 110 bp, Artificial Sequence
  scaffold variant
tactggcgcttttatcttcattactttgagagccatcaccagcgactatgtcgtatgggtaaagcgcttatttatcggagagacaatccgataaataagaagcatcaaag

SEQ ID NO: 1026 - DNA, 108 bp, Artificial Sequence
  scaffold variant
gctggcgcttttatcctcattactttgagagccatcaccagcgactatgtcgtatgggtaaagcgcttatttatcggagagaaatccgataaataagaagcatcaaag

SEQ ID NO: 1027 - DNA, 107 bp, Artificial Sequence; identical to SEQ ID NO: 475
  scaffold variant

SEQ ID NO: 1028 - DNA, 105 bp, Artificial Sequence
  scaffold variant
ctggcgcttttatctcattactttgagagccatcaccagcgactatgtcgtatgggtaaagcgcttatttatcggaggaaatccgataaataagaagcatcaaag

SEQ ID NO: 1029 - DNA, 107 bp, Artificial Sequence; identical to SEQ ID NO: 833
  scaffold variant

SEQ ID NO: 1030 - DNA, 105 bp, Artificial Sequence
  scaffold variant
atggcgcttttatctcattactttgagagccatcaccagcgactatgtcgtatgggtaaagcgcttatttatcggagataatccgataaataagaagcatcaaag

SEQ ID NO: 1031 - DNA, 108 bp, Artificial Sequence
  scaffold variant
tactggcgcttttatctcattactttgagagccatcaccagcgactatgtcgtatgggtaaagcgcttatttatcgagagaaatccgataaataagaaagcatcaaag

SEQ ID NO: 1032 - DNA, 106 bp, Artificial Sequence
  scaffold variant
gctggcgcttttatctcattactttgagagccatcaccagcgactatgtcgtatgggtaaagcgcttatttatcggagagaaatccgtaaataagaagcatcaaag

SEQ ID NO: 1033 - DNA, 109 bp, Artificial Sequence; identical to SEQ ID NO: 740
  scaffold variant

SEQ ID NO: 1034 - DNA, 106 bp, Artificial Sequence
  scaffold variant
tacggcgcttttatctcattactttgagagccatcaccagcgactatgtcgtatgggtaaagcgcttatttatcggtagaaatccgataaataagaagcatcaaag

SEQ ID NO: 1035 - DNA, 108 bp, Artificial Sequence
  scaffold variant
gctggcgcttttatctcattactttgagagccatcaccagcgactatgtcgtatgggtaaagcgcttatttatcggagagaaatccgataaataagagagcatcaaag

SEQ ID NO: 1036 - DNA, 107 bp, Artificial Sequence
  scaffold variant
tactggcgcttttatctcattactttgagagccatcaccagcgactatgtcgtatgggtaaagcgcttatttatctagagaaatccgataaataagaagcatcaaag

SEQ ID NO: 1037 - DNA, 108 bp, Artificial Sequence
  scaffold variant
gctggcgcttttatctcattactttgagagccatcaccagcgactatgtcgtatgggtaaagcgcttatttatacggagagaaatccgataaataagaagcatcaaag

SEQ ID NO: 1038 - DNA, 106 bp, Artificial Sequence
  scaffold variant
gctggcgcttttatctcattactttgagagccatcaccagcgactatgtcgtatgggtaaagcgcttatttatcaagagaaatccgataaataagaagcatcaaag

SEQ ID NO: 1039 - DNA, 107 bp, Artificial Sequence
  scaffold variant
ctggcgcttttatctcattactttgagagccatcaccagcgactatgtcgtatgggtaaagcgcttatttatcaggagagaaatccgataaataagaagcatcaaag

SEQ ID NO: 1040 - DNA, 106 bp, Artificial Sequence
  scaffold variant
cctggcgcttttatctcattactttgagagccatcaccagcgactatgtcgtatgggtaaagcgcttatttatcggagagaaatagataaataagaagcatcaaag

SEQ ID NO: 1041 - DNA, 109 bp, Artificial Sequence; identical to SEQ ID NO: 980
  scaffold variant

SEQ ID NO: 1042 - DNA, 106 bp, Artificial Sequence
  scaffold variant
tctggcgcttttatctcattactttagagccatcaccagcgactatgtcgtatgggtaaagcgcttatttatcggagagaaatccgataaataagaagcatcaaag

SEQ ID NO: 1043 - DNA, 108 bp, Artificial Sequence
  scaffold variant
actggcgcttttatcctcattactttgagagccatcaccagcgactatgtcgtatgggtaaagcgcttatttatcggagagaaatccgataaataagaagcatcaaag

SEQ ID NO: 1044 - DNA, 108 bp, Artificial Sequence
  scaffold variant
atactggcgcttttatctcattactttgagagccatcaccagcgactatgtcgtatgggtaaagcgcttatttatcgagagaaatccgataaataagaagcatcaaag

SEQ ID NO: 1045 - DNA, 108 bp, Artificial Sequence
  scaffold variant
tactggcgcttttatctctattactttgagagccatcaccagcgactatgtcgtatgggtaaagcgcttatttatcgtgagaaatccgataaataagaagcatcaaag

SEQ ID NO: 1046 - DNA, 110 bp, Artificial Sequence
  scaffold variant
tactggcgcttttatcttcattactttgagagccatcaccagcgactatgtcgtatgggtaaagcgcttatttatcgagagagaaatccgataaataagaagcatcaaag

SEQ ID NO: 1047 - DNA, 108 bp, Artificial Sequence
  scaffold variant
tactggcgcttttattctcattactttgagagccatcaccagcgactatgtcgtatgggtaaagcgcttatttatcggagagaaatccgtaaataagaagcatcaaag

SEQ ID NO: 1048 - DNA, 109 bp, Artificial Sequence
  scaffold variant
tactggcgcttttatctcattactttgagagccatcaccagcgactatgtcgtatgggtaaagcgcttatttatcggagagaaatcccgataaataagaagcatcaaag

SEQ ID NO: 1049 - DNA, 108 bp, Artificial Sequence
  scaffold variant
tactggcgcttttatctcattactttgagagccatcaccagcgactatgtcgtatgggtaaagcgcttatttatccggagagaaatcgataaataagaagcatcaaag

SEQ ID NO: 1050 - DNA, 108 bp, Artificial Sequence
  scaffold variant
gctggcgcttttatctcattactttgagagccatcaccagcgactatgtcgtatgggtaaagcgcttatttatcggagagaaatcccgataaataagaagcatcaaag

SEQ ID NO: 1051 - DNA, 107 bp, Artificial Sequence; identical to SEQ ID NO: 483
  scaffold variant

SEQ ID NO: 1052 - DNA, 108 bp, Artificial Sequence
  scaffold variant
ttactggcgcttttatctcattactttgagagccatcaccagcgactatgtcgtatgggtaaagcgcttatttatcggagagaaatcgataaataagaagcatcaaag

SEQ ID NO: 1053 - DNA, 108 bp, Artificial Sequence
  scaffold variant
tactggcgcttttatcctcattactttgagagccatcaccagcgactatgtcgtatgggtaaagcgcttatttatcggaggaaatccgataaataagaagcatcaaag

SEQ ID NO: 1054 - DNA, 108 bp, Artificial Sequence
  scaffold variant
cctggcgcttttatctcattactttgagagccatcaccagcgactatgtcgtatgggtaaagcgcttattgtatcggagagaaatccgataaataagaagcatcaaag

SEQ ID NO: 1055 - DNA, 107 bp, Artificial Sequence
  scaffold variant
ctggcgcttttatctcattactttgagagccatcaccagcgactatgtcgtatgggtaaagcgcttatttatcggagagaaatgccgataaataagaagcatcaaag

SEQ ID NO: 1056 - DNA, 106 bp, Artificial Sequence
  scaffold variant
tctggcgcttttatctcattactttgagagccatcaccagcgactatgtcgtatgggtaaagcgcttatttatcggagagaaatccgatagtaagaagcatcaaag

SEQ ID NO: 1057 - DNA, 106 bp, Artificial Sequence; identical to SEQ ID NO: 459
  scaffold variant

SEQ ID NO: 1058 - DNA, 108 bp, Artificial Sequence
  scaffold variant
tactggcgcttttattctcattactttgagagccatcaccagcgactatgtcgtatgggtaaagcgcttatttatcggaagaaatccgataaataagaagcatcaaag

SEQ ID NO: 1059 - DNA, 105 bp, Artificial Sequence
  scaffold variant
ctggcgcttttatctcattactttgagagccatcaccagcgactatgtcgtatgggtaaagcgcttatttatcggagagagtccgataaataagaagcatcaaag

SEQ ID NO: 1060 - DNA, 107 bp, Artificial Sequence
  scaffold variant
atggcgcttttatctcattactttgagagccatcaccagcgactatgtcgtatgggtaaagcgcttatttatctggagagaaatccgataaataagaagcatcaaag

SEQ ID NO: 1061 - DNA, 108 bp, Artificial Sequence
  scaffold variant
actggcgcttttatctcattactttgagagccatcaccagcgactatgtcgtatgggtaaagcgcttatttatcggagagataatccgataaataagaagcatcaaag

SEQ ID NO: 1062 - DNA, 110 bp, Artificial Sequence
  scaffold variant
tactggcgcttttatctcgattactttgagagccatcaccagcgactatgtcgtatgggtaaagcgcttatttatcggagagaaatcgcgataaataagaagcatcaaag

SEQ ID NO: 1063 - DNA, 106 bp, Artificial Sequence
  scaffold variant
cctggcgcttttatctcattactttgagagccatcaccagcgactatgtcgtatgggtaaagcattatttatcggagagaaatccgataaataagaagcatcaaag

SEQ ID NO: 1064 - DNA, 110 bp, Artificial Sequence
  scaffold variant
tactggcgcttttatctcattactttgagagccatcaccagcgactatgtcgtatgggtaaagcgcttatttatgcggagagaaatcacgataaataagaagcatcaaag

SEQ ID NO: 1065 - DNA, 107 bp, Artificial Sequence; identical to SEQ ID NO: 475
  scaffold variant

SEQ ID NO: 1066 - DNA, 107 bp, Artificial Sequence
  scaffold variant
ctggcgcttttatctcattactttgagagccatcaccagcgactatgtcgtattgggtaaagcgcttatttatcggagagaaatccgataaataagaagcatcaaag

SEQ ID NO: 1067 - DNA, 108 bp, Artificial Sequence
  scaffold variant
tactggcgcttttatctcattactttgagagccatcaccagcgactatgtcgtagtgggtaaagcgcttatttatcgggagaaatccgataaataagaagcatcaaag

SEQ ID NO: 1068 - DNA, 110 bp, Artificial Sequence
  scaffold variant
ttactggcgcttttatctcattactttgagagccatcaccagcgactatgtcgtagtgggtaaagcgcttatttatcggagagaaatccgataaataagaagcatcaaag

SEQ ID NO: 1069 - DNA, 108 bp, Artificial Sequence
  scaffold variant
tacggcgcttttatctcattactttgagagccatcaccagcgactatgtcgtatgggtaaagcgcttatttatcaggagagaaatccgataaataagaagcatcaaag

SEQ ID NO: 1070 - DNA, 108 bp, Artificial Sequence
  scaffold variant
tactggcgcttttatctgcattactttgagagccatcaccagcgactatgtcgtatgggtaaagcgcttatttatcggagagaaatccataaataagaagcatcaaag

SEQ ID NO: 1071 - DNA, 107 bp, Artificial Sequence
  scaffold variant
cctggcgcttttatctcattactttgagagccatcaccagcgactatgtcgtatgggtaaagcgcttatttatcggagagcaatccgataaataagaagcatcaaag

SEQ ID NO: 1072 - DNA, 108 bp, Artificial Sequence
  scaffold variant
tactggcgcttttatctcattactttgagagccatcaccagcgactatgtcgtatgggtaaagcgcttatttatcggagagaaatccgatgaataagaagcatcaaag

SEQ ID NO: 1073 - DNA, 108 bp, Artificial Sequence
  scaffold variant
tactggcgcttttatcttcattactttgagagccatcaccagcgactatgtcgtatgggtaaagcgcttatttatcggagagaaagcgataaataagaagcatcaaag

SEQ ID NO: 1074 - DNA, 110 bp, Artificial Sequence
  scaffold variant
tactggcgcttttatctcgattactttgagagccatcaccagcgactatgtcgtatgggtaaagcgcttatttatcgagagagaaatccgataaataagaagcatcaaag

SEQ ID NO: 1075 - DNA, 110 bp, Artificial Sequence
  scaffold variant
tactggcgcttttatctcattactttgagagccatcaccagcgactatgtcgtattgggtaaagcgcttatttatgcggagagaaatccgataaataagaagcatcaaag

SEQ ID NO: 1076 - DNA, 106 bp, Artificial Sequence
  scaffold variant
cctggcgcttttatctcattactttgagagccatcaccagcgactatgtcgtatgggtaaagcgcttatttatcggagaggatccgataaataagaagcatcaaag

SEQ ID NO: 1077 - DNA, 108 bp, Artificial Sequence
  scaffold variant
tactggcgcttttatctgcattactttgagagccatcaccagcgactatgtcgtatgggtaaagcgcttatttatggagagaaatccgataaataagaagcatcaaag

SEQ ID NO: 1078 - DNA, 106 bp, Artificial Sequence
  scaffold variant
tctggcgcttttatctcattactttgagagccatcaccagcgactatgtcgtatgggtaaagcgcttatttatcggagagaaaacgataaataagaagcatcaaag

SEQ ID NO: 1079 - DNA, 106 bp, Artificial Sequence
  scaffold variant
tactggcgcttttatctcattactttgagagccatcaccagcgactatgtcgtatgggtaaagcggtatttatcgagagaaatccgataaataagaagcatcaaag

SEQ ID NO: 1080 - DNA, 107 bp, Artificial Sequence
  scaffold variant
atggcgcttttatctcattactttgagagccatcaccagcgactatgtcgtatgggtaaagcgcttatttatcggagagaaatcacgataaataagaagcatcaaag

SEQ ID NO: 1081 - DNA, 108 bp, Artificial Sequence
  scaffold variant
tactggcgcttttatctcattactttgagagccatcaccagcgactatgtcgtatgggtaaagcgtttatttatcggagagaaatccgataaataagaagcatcaaag

SEQ ID NO: 1082 - DNA, 108 bp, Artificial Sequence
  scaffold variant
tactggcgcttttatcgtcattactttgagagccatcaccagcgactatgtcgtatgggtaaagcgcttatttatcgagagaaatccgataaataagaagcatcaaag

SEQ ID NO: 1083 - DNA, 108 bp, Artificial Sequence
  scaffold variant
actggcgcttttatctcattactttgagagccatcaccagcgactatgtcgtatgggtaaagcgcttatttatcggagagaaatcctgataaataagaagcatcaaag

SEQ ID NO: 1084 - DNA, 107 bp, Artificial Sequence
  scaffold variant
cctggcgcttttatctcattactttgagagccatcaccagcgactatgtcgtatgggtaaagcgcttatttatcggatttctctccgataaataagaagcatcaaag

SEQ ID NO: 1085 - DNA, 105 bp, Artificial Sequence; identical to SEQ ID NO: 545
  scaffold variant

SEQ ID NO: 1086 - DNA, 107 bp, Artificial Sequence; identical to SEQ ID NO: 915
  scaffold variant

SEQ ID NO: 1087 - DNA, 110 bp, Artificial Sequence
  scaffold variant
tactggcgcttttatctgcattactttgagagccatcaccagcgactatgtcgtatgggtaaagcgcttattctatcggagagaaatccgataaataagaagcatcaaag

SEQ ID NO: 1088 - DNA, 107 bp, Artificial Sequence; identical to SEQ ID NO: 915
  scaffold variant

SEQ ID NO: 1089 - DNA, 108 bp, Artificial Sequence
  scaffold variant
tctggcgcttttatctcattactttgagagccatcaccagcgactatgtcgtatgggtaaagcgcttatttatcggagagtaaatccgataaataagaagcatcaaag

SEQ ID NO: 1090 - DNA, 108 bp, Artificial Sequence
  scaffold variant
tactggcgcttttatcttcattactttgagagccatcaccagcgactatgtcgtatgggtaaagcgcttatttatcgcgagaaatccgataaataagaagcatcaaag

SEQ ID NO: 1091 - DNA, 107 bp, Artificial Sequence
  scaffold variant
tactggcgcttttatctcattactttgagagccatcaccagcgactatgtcgtatgggtaaagcgcttatttattgagagaaatccgataaataagaagcatcaaag

SEQ ID NO: 1092 - DNA, 107 bp, Artificial Sequence; identical to SEQ ID NO: 833
  scaffold variant

SEQ ID NO: 1093 - DNA, 108 bp, Artificial Sequence
  scaffold variant
tactggcgcttttatactcattactttgagagccatcaccagcgactatgtcgtatgggtaaagcgcttatttatcgggagaaatccgataaataagaagcatcaaag

SEQ ID NO: 1094 - DNA, 108 bp, Artificial Sequence
  scaffold variant
tactggcgcttttatcctcattactttgagagccatcaccagcgactatgtcgtatgggtaaagcgcttatttacggagagaaatccgataaataagaagcatcaaag

SEQ ID NO: 1095 - DNA, 108 bp, Artificial Sequence
  scaffold variant
tactggcgcttttatctctattactttgagagccatcaccagcgactatgtcgtatgggtaaagcgcttatttatccagagaaatccgataaataagaagcatcaaag

SEQ ID NO: 1096 - DNA, 109 bp, Artificial Sequence; identical to SEQ ID NO: 740
  scaffold variant

SEQ ID NO: 1097 - DNA, 107 bp, Artificial Sequence
  scaffold variant
tactggcgcttttatctcattactttgagagccatcaccagcgactatgtcgtatgggtaaagcgcttatttatcggagagaaatccataaataagaagcatcaaag

SEQ ID NO: 1098 - DNA, 106 bp, Artificial Sequence
  scaffold variant
tacggcgcttttatctcattactttgagagccatcaccagcgactatgtcgtatgggtaaagccttatttatcggagagaaatccgataaataagaagcatcaaag

SEQ ID NO: 1099 - DNA, 110 bp, Artificial Sequence
  scaffold variant
tactggcgcttttatctcattactttgagagccatcaccagcgactatgtcgtatgggtaaagcgcttatttattcggagagaaatcccgataaataagaagcatcaaag

SEQ ID NO: 1100 - DNA, 106 bp, Artificial Sequence
  scaffold variant
actggcgcttttatctcattactttagagccatcaccagcgactatgtcgtatgggtaaagcgcttatttatcggagagaaatccgataaataagaagcatcaaag

SEQ ID NO: 1101 - DNA, 107 bp, Artificial Sequence; identical to SEQ ID NO: 833
  scaffold variant

SEQ ID NO: 1102 - DNA, 104 bp, Artificial Sequence
  scaffold variant
ctggcgcttttatctcattactttgagagccatcaccagcgactatgtcgtatgggtaaagcgcttatttatcggagagatccgataaataagaagcatcaaag

SEQ ID NO: 1103 - DNA, 108 bp, Artificial Sequence; identical to SEQ ID NO: 442
  scaffold variant

SEQ ID NO: 1104 - DNA, 105 bp, Artificial Sequence
  scaffold variant
atggcgcttttatctcattactttgagagccatcaccagcgactatgtcgtatgggtaaagcgcttatttatcggaggaaatccgataaataagaagcatcaaag

SEQ ID NO: 1105 - DNA, 106 bp, Artificial Sequence; identical to SEQ ID NO: 988
  scaffold variant

SEQ ID NO: 1106 - DNA, 108 bp, Artificial Sequence
  scaffold variant
tacggcgcttttatctcattactttgcagagccatcaccagcgactatgtcgtatgggtaaagcgcttatttatcggagagaaatccgataaataagaagcatcaaag

SEQ ID NO: 1107 - DNA, 109 bp, Artificial Sequence; identical to SEQ ID NO: 980
  scaffold variant

SEQ ID NO: 1108 - DNA, 106 bp, Artificial Sequence
  scaffold variant
actggcgcttttatctcattactttgagagccatcaccagcgactatgtcgtatgggtaaagcgcttattctcggagagaaatccgataaataagaagcatcaaag

SEQ ID NO: 1109 - DNA, 109 bp, Artificial Sequence
  scaffold variant
tactggcgcttttatcttcattactttgagagccatcaccagcgactatgtcgtatgggtaaagcgcttatttatcggcgagaaatccgataaataagaagcatcaaag

SEQ ID NO: 1110 - DNA, 105 bp, Artificial Sequence
  scaffold variant
cctggcgcttttatctcattactttgagagccatcaccagcgactatgtcgtatgggtaaagcgcttatttatcggagagaaacgataaataagaagcatcaaag

SEQ ID NO: 1111 - DNA, 110 bp, Artificial Sequence
  scaffold variant
tactggcgcttttatctgcattactttgagagccatcaccagcgactatgtcgtatgggtaaagcgcttatttactcggagagaaatccgataaataagaagcatcaaag

SEQ ID NO: 1112 - DNA, 110 bp, Artificial Sequence
  scaffold variant
tactggcgcttttatcttcattactttgagagccatcaccagcgactatgtcgtatgggtaaagcgcttatttatcggagagaaatcacgataaataagaagcatcaaag

SEQ ID NO: 1113 - DNA, 109 bp, Artificial Sequence; identical to SEQ ID NO: 518
  scaffold variant

SEQ ID NO: 1114 - DNA, 105 bp, Artificial Sequence
  scaffold variant
cctggcgcttttatctcattactttgagagccatcaccagcgactatgtcgtatgggtaaagcgcttatttatcggagagatccgataaataagaagcatcaaag

SEQ ID NO: 1115 - DNA, 106 bp, Artificial Sequence
  scaffold variant
gctggcgcttttatctcattactttgagagccatcaccagcgactatgtcgtatgggtaaagcgcttatttacggagagaaatccgataaataagaagcatcaaag

SEQ ID NO: 1116 - DNA, 108 bp, Artificial Sequence
  scaffold variant
ttactggcgcttttatctcattactttgagagccatcaccagcgactatgtcgtatgggtaaagcgcttatttatcaagagaaatccgataaataagaagcatcaaag

SEQ ID NO: 1117 - DNA, 106 bp, Artificial Sequence
  scaffold variant
tggcgcttttatctcattactttgagagccatcaccagcgactatgtcgtatgggtaaagcgcttatttactcggagagaaatccgataaataagaagcatcaaag

SEQ ID NO: 1118 - DNA, 106 bp, Artificial Sequence
  scaffold variant
tacggcgcttttatctcattactttgagagccatcaccagcgactatgtcgtatgggtaaagcgcttatttatcggagagaaagcgataaataagaagcatcaaag

SEQ ID NO: 1119 - DNA, 109 bp, Artificial Sequence
  scaffold variant
tactggcgcttttatctcattactttgagagccatcaccagcgactatgtcgtatgggtaaagcgcttatttatcggagagaaatctcgataaataagaagcatcaaag

SEQ ID NO: 1120 - DNA, 104 bp, Artificial Sequence; identical to SEQ ID NO: 777
  scaffold variant

SEQ ID NO: 1121 - DNA, 109 bp, Artificial Sequence
  scaffold variant
tactggcgcttttatctcattactttgagagccatcaccagcgactatgtcgtatgggtaaagcgcttatttatcgtgagagaaatccgataaataagaagcatcaaag

SEQ ID NO: 1122 - DNA, 108 bp, Artificial Sequence
  scaffold variant
gctggcgcttttatctcattactttgagagccatcaccagcgactatgtcgtatgggtaaagcgcttatttatcgtgagagaaatccgataaataagaagcatcaaag

SEQ ID NO: 1123 - DNA, 110 bp, Artificial Sequence
  scaffold variant
tactggcgcttttatcttcattactttgagagccatcaccagcgactatgtcgtatgggtaaagcgcttatttagtcggagagaaatccgataaataagaagcatcaaag

SEQ ID NO: 1124 - DNA, 106 bp, Artificial Sequence
  scaffold variant
gctggcgcttttatctcattactttgagagccatcaccagcgactatgtcgtatgggtaaagcgcttatttatcgagagaaatccgataaataagaagcatcaaag

SEQ ID NO: 1125 - DNA, 108 bp, Artificial Sequence
  scaffold variant
tctggcgcttttatctcattactttgagagccatcaccagcgactatgtcgtatgggtaaagcgcttatttgatcggagagaaatccgataaataagaagcatcaaag

SEQ ID NO: 1126 - DNA, 106 bp, Artificial Sequence
  scaffold variant
actggcgcttttatctcattactttgagagccatcaccagcgactatgtcgtatgggtaaagcgcttatttatcgtgagaaatccgataaataagaagcatcaaag

SEQ ID NO: 1127 - DNA, 109 bp, Artificial Sequence
  scaffold variant
tactggcgcttttatctcattactttagagagccatcaccagcgactatgtcgtatgggtaaagcgcttatttatcggatttctctccgataaataagaagcatcaaag

SEQ ID NO: 1128 - DNA, 106 bp, Artificial Sequence
  scaffold variant
tactggcgcttttatctcattactttgagagccatcaccagcgactatgtcgtatgggtaaagcggtatttatcgggagaaatccgataaataagaagcatcaaag

SEQ ID NO: 1129 - DNA, 110 bp, Artificial Sequence
  scaffold variant
tactggcgcttttatcctcattactttgagagccatcaccagcgactatgtcgtatgggtaaagcgcttatttatcggagagaaatgccgataaataagaagcatcaaag

SEQ ID NO: 1130 - DNA, 108 bp, Artificial Sequence
  scaffold variant
tctggcgcttttatctcattactttgagagccatcaccagcgactatgtcgtatgggtaaagcgcttattatatcggagagaaatccgataaataagaagcatcaaag

SEQ ID NO: 1131 - DNA, 107 bp, Artificial Sequence; identical to SEQ ID NO: 833
  scaffold variant

SEQ ID NO: 1132 - DNA, 109 bp, Artificial Sequence
  scaffold variant
tactggcgcttttatctcattactttgagagccatcaccagcgactatgtcgtatgggtaaagcgcttatttatcgcgagagaaatccgataaataagaagcatcaaag

SEQ ID NO: 1133 - DNA, 107 bp, Artificial Sequence; identical to SEQ ID NO: 386
  scaffold variant

SEQ ID NO: 1134 - DNA, 108 bp, Artificial Sequence
  scaffold variant
ctactggcgcttttatctcattactttgagagccatcaccagcgactatgtcgtatgggtaaagcgcttatttatcggagagaaatccataaataagaagcatcaaag

SEQ ID NO: 1135 - DNA, 106 bp, Artificial Sequence
  scaffold variant
actggcgcttttatctcattactttgagagccatcaccagcgactatgtcgtatgggtaaagcgcttatttatcggagagaaaccgataaataagaagcatcaaag

SEQ ID NO: 1136 - DNA, 106 bp, Artificial Sequence; identical to SEQ ID NO: 401
  scaffold variant

SEQ ID NO: 1137 - DNA, 107 bp, Artificial Sequence
  scaffold variant
tactggcgcttttatctcattactttgagagccatcaccagcgactatgtcgtatgggtaaagcgcttatttatcggagagaaatccgtaaataagaagcatcaaag

SEQ ID NO: 1138 - DNA, 108 bp, Artificial Sequence
  scaffold variant
cctggcgcttttatctcattactttgagagccatcaccagcgactatgtcgtatgggtaaagcgcttatttatcggagagcaaatccgataaataagaagcatcaaag

SEQ ID NO: 1139 - DNA, 105 bp, Artificial Sequence
  scaffold variant
ctggcgcttttatctcattactttgagagccatcaccagcgactatgtcgtatgggtaaagcgcttatttatcggagagattccgataaataagaagcatcaaag

SEQ ID NO: 1140 - DNA, 108 bp, Artificial Sequence
  scaffold variant
tactggcgcttttatctctattactttgagagccatcaccagcgactatgtcgtatgggtaaagcgcttatttatcggagataatccgataaataagaagcatcaaag

SEQ ID NO: 1141 - DNA, 109 bp, Artificial Sequence; identical to SEQ ID NO: 1048
  scaffold variant

SEQ ID NO: 1142 - DNA, 108 bp, Artificial Sequence
  scaffold variant
tctggcgcttttatctcattactttgagagccatcaccagcgactatgtcgtatgggtaaagcgcttatttatcggagagaaatccgataaataagagagcatcaaag

SEQ ID NO: 1143 - DNA, 105 bp, Artificial Sequence; identical to SEQ ID NO: 379
  scaffold variant

SEQ ID NO: 1144 - DNA, 110 bp, Artificial Sequence
  scaffold variant
tactggcgcttttatcctcattactttgagagccatcaccagcgactatgtcgtatgggtaaagcgcttatttatcaggagagaaatccgataaataagaagcatcaaag

SEQ ID NO: 1145 - DNA, 109 bp, Artificial Sequence
  scaffold variant
tactggcgcttttatctcattactttgagagccatcaccagcgactatgtcgtatgggtaaagcgcttatttatcgagagagaaatccgataaataagaagcatcaaag

SEQ ID NO: 1146 - DNA, 110 bp, Artificial Sequence
  scaffold variant
tactggcgcttttatctcattactttgagagccatcaccagcgactatgtcgtattgggtaaagcgcttatttatcggagagaaatcgcgataaataagaagcatcaaag

SEQ ID NO: 1147 - DNA, 107 bp, Artificial Sequence
  scaffold variant
cctggcgcttttatctcattactttgagagccatcaccagcgactatgtcgtatgggtaaagcgcttatttatcggagagaaatctgataaataagaagcatcaaag

SEQ ID NO: 1148 - DNA, 108 bp, Artificial Sequence
  scaffold variant
tactggcgcttttatcctcattactttgagagccatcaccagcgactatgtcgtatgggtaaagcgcttatttatcaagagaaatccgataaataagaagcatcaaag

SEQ ID NO: 1149 - DNA, 110 bp, Artificial Sequence
  scaffold variant
tactggcgcttttatctcattactttgagagccatcaccagcgactatgtcgtatgggtaaagcgcttatttatacggagagaaatcgcgataaataagaagcatcaaag

SEQ ID NO: 1150 - DNA, 105 bp, Artificial Sequence; identical to SEQ ID NO: 880
  scaffold variant

SEQ ID NO: 1151 - DNA, 108 bp, Artificial Sequence
  scaffold variant
tactggcgcttttattctcattactttgagagccatcaccagcgactatgtcgtatgggtaaagcgcttatttatcgcgagaaatccgataaataagaagcatcaaag

SEQ ID NO: 1152 - DNA, 106 bp, Artificial Sequence
  scaffold variant
atggcgcttttatctcattactttgagagccatcaccagcgactatgtcgtatgggtaaagcgcttatttatcggagagaaatccgataaataagaagcatcaaag

SEQ ID NO: 1153 - DNA, 108 bp, Artificial Sequence
  scaffold variant
tactggcgcttttatctcgattactttgagagccatcaccagcgactatgtcgtatgggtaaagcgcttattttcggagagaaatccgataaataagaagcatcaaag

SEQ ID NO: 1154 - DNA, 106 bp, Artificial Sequence
  scaffold variant
tactggcgcttttatctcattactttgagagccatcaccagcgactatgtcgtatgggtaaagcgcttatttatcggagagaaacgataaataagaagcatcaaag

SEQ ID NO: 1155 - DNA, 110 bp, Artificial Sequence
  scaffold variant
tacctggcgcttttatctcattactttgagagccatcaccagcgactatgtcgtatgggtaaagcgcttatttatcggagagaaatcgcgataaataagaagcatcaaag

SEQ ID NO: 1156 - DNA, 109 bp, Artificial Sequence; identical to SEQ ID NO: 980
  scaffold variant

SEQ ID NO: 1157 - DNA, 108 bp, Artificial Sequence
  scaffold variant
tacctggcgcttttatctcattactttgagagccatcaccagcgactatgtcgtatgggtaaagcgcttatttatctagagaaatccgataaataagaagcatcaaag

SEQ ID NO: 1158 - DNA, 105 bp, Artificial Sequence
  scaffold variant
ggcgcttttatctcattactttgagagccatcaccagcgactatgtcgtatgggtaaagcgcttatttatccggagagaaatccgataaataagaagcatcaaag

SEQ ID NO: 1159 - DNA, 110 bp, Artificial Sequence
  scaffold variant
atactggcgcttttatctcattactttgagagccatcaccagcgactatgtcgtatgggtaaagcgcttatttatcggagagaaatcacgataaataagaagcatcaaag

SEQ ID NO: 1160 - DNA, 107 bp, Artificial Sequence; identical to SEQ ID NO: 578
  scaffold variant

SEQ ID NO: 1161 - DNA, 106 bp, Artificial Sequence
  scaffold variant
gctggcgcttttatctcattactttgagagccatcaccagcgactatgtcgtatgggtaaagcgcttatttatcgggagaaatccgataaataagaagcatcaaag

SEQ ID NO: 1162 - DNA, 107 bp, Artificial Sequence
  scaffold variant
cctggcgcttttatctcattactttgagagccatcaccagcgactatgtcgtatgggtaaagcgcttatttttcggagagaaatccgataaataagaagcatcaaag

SEQ ID NO: 1163 - DNA, 110 bp, Artificial Sequence
  scaffold variant
tactggcgcttttatctacattactttgagagccatcaccagcgactatgtcgtatgggtaaagcgcttatttatcggagagaaatcccgataaataagaagcatcaaag

SEQ ID NO: 1164 - DNA, 106 bp, Artificial Sequence
  scaffold variant
tctggcgcttttatctcattactttgagagccatcaccagcgactatgtcgtatgggtaaagcggtatttatcggagagaaatccgataaataagaagcatcaaag

SEQ ID NO: 1165 - DNA, 109 bp, Artificial Sequence
  scaffold variant
tactggcgcttttatctcattactttgagagccatcaccagcgactatgtcgtatgggtaaagcgcttatttatcggagagaaatccgaataaataagaagcatcaaag

SEQ ID NO: 1166 - DNA, 108 bp, Artificial Sequence
  scaffold variant
tactggcgcttttatcatcattactttgagagccatcaccagcgactatgtcgtatgggtaaagcgcttatttatctagagaaatccgataaataagaagcatcaaag

SEQ ID NO: 1167 - DNA, 105 bp, Artificial Sequence
  scaffold variant
cctggcgcttttatctcattactttgagagccatcaccagcgactatgtcgtatgggtaaagcgcttatttaggagagaaatccgataaataagaagcatcaaag

SEQ ID NO: 1168 - DNA, 110 bp, Artificial Sequence
  scaffold variant
ttactggcgcttttatctcattactttgagagccatcaccagcgactatgtcgtatgggtaaagcgcttatttactcggagagaaatccgataaataagaagcatcaaag

SEQ ID NO: 1169 - DNA, 107 bp, Artificial Sequence; identical to SEQ ID NO: 990
  scaffold variant

SEQ ID NO: 1170 - DNA, 110 bp, Artificial Sequence
  scaffold variant
ctactggcgcttttatctcattactttgagagccatcaccagcgactatgtcgtatgggtaaagcgcttatttatctggagagaaatccgataaataagaagcatcaaag

SEQ ID NO: 1171 - DNA, 107 bp, Artificial Sequence; identical to SEQ ID NO: 925
  scaffold variant

SEQ ID NO: 1172 - DNA, 107 bp, Artificial Sequence; identical to SEQ ID NO: 517
  scaffold variant

SEQ ID NO: 1173 - DNA, 110 bp, Artificial Sequence
  scaffold variant
tactggcgcttttatctctattactttgagagccatcaccagcgactatgtcgtatgggtaaagcgcttatttatcgggagagaaatccgataaataagaagcatcaaag

SEQ ID NO: 1174 - DNA, 109 bp, Artificial Sequence; identical to SEQ ID NO: 980
  scaffold variant

SEQ ID NO: 1175 - DNA, 107 bp, Artificial Sequence
  scaffold variant
atggcgcttttatctcattactttgagagccatcaccagcgactatgtcgtatgggtaaagcgcttatttatcggcagagaaatccgataaataagaagcatcaaag

SEQ ID NO: 1176 - DNA, 109 bp, Artificial Sequence; identical to SEQ ID NO: 912
  scaffold variant

SEQ ID NO: 1177 - DNA, 109 bp, Artificial Sequence
  scaffold variant
tactggcgcttttatctcattactttgagagccatcaccagcgactatgtcgtatgggtaaagcgcttatttatcggagagaaatgccgataaataagaagcatcaaag

SEQ ID NO: 1178 - DNA, 107 bp, Artificial Sequence; identical to SEQ ID NO: 1091
  scaffold variant

SEQ ID NO: 1179 - DNA, 110 bp, Artificial Sequence
  scaffold variant
tactggcgcttttatctcattactttagagagccatcaccagcgactatgtcgtatgggtaaagcgcttattctatcggagagaaatccgataaataagaagcatcaaag

SEQ ID NO: 1180 - DNA, 105 bp, Artificial Sequence
  scaffold variant
cctggcgcttttatctcattactttgagagccatcaccagcgactatgtcgtatgggtaaagcgcttatttatcggagagttccgataaataagaagcatcaaag

SEQ ID NO: 1181 - DNA, 108 bp, Artificial Sequence
  scaffold variant
ttactggcgcttttatctcattactttgagagccatcaccagcgactatgtcgtatgggtaaagcgcttatttatcgggagaaatccgataaataagaagcatcaaag

SEQ ID NO: 1182 - DNA, 104 bp, Artificial Sequence
  scaffold variant
tggcgcttttatctcattactttgagagccatcaccagcgactatgtcgtatgggtaaagcgcttatttatcggagagaaatcgataaataagaagcatcaaag

SEQ ID NO: 1183 - DNA, 109 bp, Artificial Sequence
  scaffold variant
tactggcgcttttatctcattactttgagagccatcaccagcgactatgtcgtatgggtaaagcgcttatttatcgggagagaaatccgataaataagaagcatcaaag

SEQ ID NO: 1184 - DNA, 108 bp, Artificial Sequence
  scaffold variant
tactggcgcttttatcctcattactttgagagccatcaccagcgactatgtcgtatgggtaaagcgcttatttattgagagaaatccgataaataagaagcatcaaag

SEQ ID NO: 1185 - DNA, 110 bp, Artificial Sequence
  scaffold variant
tactggcgcttttatcttcattactttgagagccatcaccagcgactatgtcgtatgggtaaagcgcttatttatacggagagaaatccgataaataagaagcatcaaag

SEQ ID NO: 1186 - DNA, 107 bp, Artificial Sequence
  scaffold variant
tactggcgcttttattctcattactttgagagccatcaccagcgactatgtcgtatgggtaaagcgcttatttatcggagaaatccgataaataagaagcatcaaag

SEQ ID NO: 1187 - DNA, 107 bp, Artificial Sequence
  scaffold variant
tactggcgcttttatcttcattactttgagagccatcaccagcgactatgtcgtatgggtaaagcgcttatttatcggagagatccgataaataagaagcatcaaag

SEQ ID NO: 1188 - DNA, 108 bp, Artificial Sequence
  scaffold variant
actggcgcttttattctcattactttgagagccatcaccagcgactatgtcgtatgggtaaagcgcttatttatcggagagaaatccgataaataagaagcatcaaag

SEQ ID NO: 1189 - DNA, 106 bp, Artificial Sequence
  scaffold variant
ctggcgcttttatctcattactttgagagccatcaccagcgactatgtcgtatgggtaaagcgcttatttatcggtgagaaatccgataaataagaagcatcaaag

SEQ ID NO: 1190 - DNA, 110 bp, Artificial Sequence
  scaffold variant
tactggcgcttttatctcattactttcgagagccatcaccagcgactatgtcgtatgggtaaagcgcttattctatcggagagaaatccgataaataagaagcatcaaag

SEQ ID NO: 1191 - DNA, 107 bp, Artificial Sequence
  scaffold variant
actggcgcttttatctcattactttgagagccatcaccagcgactatgtcgtatgggtaaagcgcttatttatcggtgagaaatccgataaataagaagcatcaaag

SEQ ID NO: 1192 - DNA, 107 bp, Artificial Sequence; identical to SEQ ID NO: 990
  scaffold variant

SEQ ID NO: 1193 - DNA, 108 bp, Artificial Sequence
  scaffold variant
gctggcgcttttatctcattactttgagagccatcaccagcgactatgtcgtatgggtaaagcgcttatttatcggagagaaatgccgataaataagaagcatcaaag

SEQ ID NO: 1194 - DNA, 110 bp, Artificial Sequence
  scaffold variant
tactggcgcttttatctcattactttgagagccatcaccagcgactatgtcgtatgggtaaagcgcttatttatccggagagaaatcgcgataaataagaagcatcaaag

SEQ ID NO: 1195 - DNA, 108 bp, Artificial Sequence
  scaffold variant
tactggcgcttttatctgcattactttgagagccatcaccagcgactatgtcgtatgggtaaagcgcttatttatagagagaaatccgataaataagaagcatcaaag

SEQ ID NO: 1196 - DNA, 109 bp, Artificial Sequence
  scaffold variant
tactggcgcttttatctcattactttgagagccatcaccagcgactatgtcgtatgggtaaagcgcttatttatcggagagaaataccgataaataagaagcatcaaag

SEQ ID NO: 1197 - DNA, 108 bp, Artificial Sequence
  scaffold variant
tactggcgcttttatcttcattactttgagagccatcaccagcgactatgtcgtatgggtaaagcgcttatttatcgtgagaaatccgataaataagaagcatcaaag

SEQ ID NO: 1198 - DNA, 106 bp, Artificial Sequence
  scaffold variant
actggcgcttttatctcattactttgagagccatcaccagcgactatgtcgtatgggtaaagcgcttatttccggagagaaatccgataaataagaagcatcaaag

SEQ ID NO: 1199 - DNA, 109 bp, Artificial Sequence; identical to SEQ ID NO: 740
  scaffold variant

SEQ ID NO: 1200 - DNA, 109 bp, Artificial Sequence; identical to SEQ ID NO: 740
  scaffold variant

SEQ ID NO: 1201 - DNA, 108 bp, Artificial Sequence
  scaffold variant
tactggcgcttttatctcattactttgagagccatcaccagcgactatgtcgtatgggtaaagcgcttatttatgcggagagaaatccataaataagaagcatcaaag

SEQ ID NO: 1202 - DNA, 108 bp, Artificial Sequence
  scaffold variant
tactggcgcttttatctctattactttgagagccatcaccagcgactatgtcgtatgggtaaagcgcttatttatctagagaaatccgataaataagaagcatcaaag

SEQ ID NO: 1203 - DNA, 110 bp, Artificial Sequence
  scaffold variant
tactggcgcttttatctctattactttgagagccatcaccagcgactatgtcgtatgggtaaagcgcttatttattcggagagaaatccgataaataagaagcatcaaag

SEQ ID NO: 1204 - DNA, 110 bp, Artificial Sequence
  scaffold variant
tactggcgcttttatctcgattactttgagagccatcaccagcgactatgtcgtatgggtaaagcgcttatttatcggagagaaatcacgataaataagaagcatcaaag

SEQ ID NO: 1205 - DNA, 108 bp, Artificial Sequence
  scaffold variant
tactggcgcttttatctgcattactttgagagccatcaccagcgactatgtcgtatgggtaaagcgcttatttatcgcgagaaatccgataaataagaagcatcaaag

SEQ ID NO: 1206 - DNA, 106 bp, Artificial Sequence
  scaffold variant
actggcgcttttatctcattactttgagagccatcaccagcgactatgtcgtatgggtaaagcgcttatttatcggagagaatccgataaataagaagcatcaaag

SEQ ID NO: 1207 - DNA, 107 bp, Artificial Sequence
  scaffold variant
cctggcgcttttatctcattactttgagagccatcaccagcgactatgtcgtatgggtaaagcgcttatttatcggagagaaatccgatgaataagaagcatcaaag

SEQ ID NO: 1208 - DNA, 110 bp, Artificial Sequence
  scaffold variant
tactggcgcttttatcctcattactttgagagccatcaccagcgactatgtcgtatgggtaaagcgcttatttatcgggagagaaatccgataaataagaagcatcaaag

SEQ ID NO: 1209 - DNA, 108 bp, Artificial Sequence
  scaffold variant
tactggcgcttttaatctcattactttgagagccatcaccagcgactatgtcgtatgggtaaagcgcttatttatcaagagaaatccgataaataagaagcatcaaag

SEQ ID NO: 1210 - DNA, 107 bp, Artificial Sequence
  scaffold variant
ctggcgcttttatcttcattactttgagagccatcaccagcgactatgtcgtatgggtaaagcgcttatttatcggagagaaatccgataaataagaagcatcaaag

SEQ ID NO: 1211 - DNA, 108 bp, Artificial Sequence
  scaffold variant
tactggcgcttttattctcattactttgagagccatcaccagcgactatgtcgtatgggtaaagcgcttatttccggagagaaatccgataaataagaagcatcaaag

SEQ ID NO: 1212 - DNA, 108 bp, Artificial Sequence
  scaffold variant
tactggcgcttttatctctattactttgagagccatcaccagcgactatgtcgtatgggtaaagcgcttatttatcggaagaaatccgataaataagaagcatcaaag

SEQ ID NO: 1213 - DNA, 107 bp, Artificial Sequence; identical to SEQ ID NO: 1036
  scaffold variant

SEQ ID NO: 1214 - DNA, 107 bp, Artificial Sequence; identical to SEQ ID NO: 833
  scaffold variant

SEQ ID NO: 1215 - DNA, 109 bp, Artificial Sequence; identical to SEQ ID NO: 912
  scaffold variant

SEQ ID NO: 1216 - DNA, 110 bp, Artificial Sequence
  scaffold variant
tactggcgcttttattctcattactttgagagccatcaccagcgactatgtcgtatgggtaaagcgcttattgtatcggagagaaatccgataaataagaagcatcaaag

SEQ ID NO: 1217 - DNA, 105 bp, Artificial Sequence
  scaffold variant
tacggcgcttttatctcattactttgagagccatcaccagcgactatgtcgtatgggtaaagcgcttatttatcggagagaaccgataaataagaagcatcaaag

SEQ ID NO: 1218 - DNA, 107 bp, Artificial Sequence
  scaffold variant
tactggcgcttttatctcattactttgagagccatcaccagcgactatgtcgtatgggtaaagcgcttatttatcggagagaaatcgataaataagaagcatcaaag

SEQ ID NO: 1219 - DNA, 109 bp, Artificial Sequence; identical to SEQ ID NO: 740
  scaffold variant

SEQ ID NO: 1220 - DNA, 109 bp, Artificial Sequence; identical to SEQ ID NO: 1010
  scaffold variant

SEQ ID NO: 1221 - DNA, 109 bp, Artificial Sequence; identical to SEQ ID NO: 740
  scaffold variant

SEQ ID NO: 1222 - DNA, 108 bp, Artificial Sequence
  scaffold variant
tacggcgcttttatctcattactttgagagccatcaccagcgactatgtcgtatgggtaaagcgcttatttatcggagagcaaatccgataaataagaagcatcaaag

SEQ ID NO: 1223 - DNA, 105 bp, Artificial Sequence; identical to SEQ ID NO: 698
  scaffold variant

SEQ ID NO: 1224 - DNA, 110 bp, Artificial Sequence
  scaffold variant
tactggcgcttttatcgtcattactttgagagccatcaccagcgactatgtcgtatgggtaaagcgcttatttatacggagagaaatccgataaataagaagcatcaaag

SEQ ID NO: 1225 - DNA, 108 bp, Artificial Sequence
  scaffold variant
tactggcgcttttatctgcattactttgagagccatcaccagcgactatgtcgtatgggtaaagcgcttatttatcaagagaaatccgataaataagaagcatcaaag

SEQ ID NO: 1226 - DNA, 108 bp, Artificial Sequence
  scaffold variant
tactggcgcttttatcctcattactttgagagccatcaccagcgactatgtcgtatgggtaaagcgcttatttatccagagaaatccgataaataagaagcatcaaag

SEQ ID NO: 1227 - DNA, 110 bp, Artificial Sequence
  scaffold variant
tactggcgcttttatctcgattactttgagagccatcaccagcgactatgtcgtatgggtaaagcgcttatttatcggagagaaataccgataaataagaagcatcaaag

SEQ ID NO: 1228 - DNA, 120 bp, Artificial Sequence
  scaffold variant
tactggcgcttttatctcattactttgctcattactttgagagccatcaccagcgactatgtcgtatgggtaaagcgcttatttatcggagagaaatccgataaataagaagcatcaaag

SEQ ID NO: 1229 - DNA, 104 bp, Artificial Sequence; identical to SEQ ID NO: 609
  scaffold variant

SEQ ID NO: 1230 - DNA, 106 bp, Artificial Sequence; identical to SEQ ID NO: 771
  scaffold variant

SEQ ID NO: 1231 - DNA, 108 bp, Artificial Sequence
  scaffold variant
actggcgcttttatctcattactttgagagccatcaccagcgactatgtcgtattgggtaaagcgcttatttatcggagagaaatccgataaataagaagcatcaaag

SEQ ID NO: 1232 - DNA, 110 bp, Artificial Sequence
  scaffold variant
tactggcgcttttatctcattactttgagagccatcaccagcgactatgtcgtatgggtaaagcgcttatttatgcggagagaaatccgaataaataagaagcatcaaag

SEQ ID NO: 1233 - DNA, 109 bp, Artificial Sequence; identical to SEQ ID NO: 837
  scaffold variant

SEQ ID NO: 1234 - DNA, 108 bp, Artificial Sequence
  scaffold variant
tactggcgcttttatctcattactttgagagccatcaccagcgactatgtcgtatgggtaaagcgcttatttgtcggagagaaatccgataaataagaagcatcaaag

SEQ ID NO: 1235 - DNA, 106 bp, Artificial Sequence
  scaffold variant
gctggcgcttttatctcattactttgagagccatcaccagcgactatgtcgtatgggtaaagcgcttatttatggagagaaatccgataaataagaagcatcaaag

SEQ ID NO: 1236 - DNA, 106 bp, Artificial Sequence
  scaffold variant
cctggcgcttttatctcattactttgagagccatcaccagcgactatgtcgtatgggtaaagcgcttatttatcggagagaaatccgatgataagaagcatcaaag

SEQ ID NO: 1237 - DNA, 108 bp, Artificial Sequence
  scaffold variant
gctggcgcttttatctcattactttgagagccatcaccagcgactatgtcgtatgggtaaagcgcttatttatcggagagaaatctcgataaataagaagcatcaaag

SEQ ID NO: 1238 - DNA, 108 bp, Artificial Sequence
  scaffold variant
cctggcgcttttaatctcattactttgagagccatcaccagcgactatgtcgtatgggtaaagcgcttatttatcggagagaaatccgataaataagaagcatcaaag

SEQ ID NO: 1239 - DNA, 109 bp, Artificial Sequence; identical to SEQ ID NO: 518
  scaffold variant

SEQ ID NO: 1240 - DNA, 110 bp, Artificial Sequence
  scaffold variant
ttactggcgcttttatctcattactttgagagccatcaccagcgactatgtcgtatgggtaaagcgcttatttagtcggagagaaatccgataaataagaagcatcaaag

SEQ ID NO: 1241 - DNA, 110 bp, Artificial Sequence
  scaffold variant
tactggcgcttttatctctattactttgagagccatcaccagcgactatgtcgtagtgggtaaagcgcttatttatcggagagaaatccgataaataagaagcatcaaag

SEQ ID NO: 1242 - DNA, 110 bp, Artificial Sequence
  scaffold variant
tactggcgcttttatctcattactttgagagccatcaccagcgactatgtcgtatgggtaaagcgcttatttatgcggagagaaatccgataaataagaaagcatcaaag

SEQ ID NO: 1243 - DNA, 110 bp, Artificial Sequence
  scaffold variant
tactggcgcttttatctcattactttcgagagccatcaccagcgactatgtcgtatgggtaaagcgcttatttatcggagagaaatccgagtaaataagaagcatcaaag

SEQ ID NO: 1244 - DNA, 107 bp, Artificial Sequence; identical to SEQ ID NO: 990
  scaffold variant

SEQ ID NO: 1245 - DNA, 106 bp, Artificial Sequence
  scaffold variant
cctggcgcttttatctcattactttgagagccatcaccagcgactatgtcgtatgggtaaagcgttatttatcggagagaaatccgataaataagaagcatcaaag

SEQ ID NO: 1246 - DNA, 104 bp, Artificial Sequence
  scaffold variant
ctggcgcttttatctcattactttgagagccatcaccagcgactatgtcgtatgggtaaagcgcttatttatcggagatatccgataaataagaagcatcaaag

SEQ ID NO: 1247 - DNA, 107 bp, Artificial Sequence; identical to SEQ ID NO: 533
  scaffold variant

SEQ ID NO: 1248 - DNA, 108 bp, Artificial Sequence
  scaffold variant
tcactggcgcttttatctcattactttgagagccatcaccagcgactatgtcgtatgggtaaagcgcttatttatcgagagaaatccgataaataagaagcatcaaag

SEQ ID NO: 1249 - DNA, 107 bp, Artificial Sequence; identical to SEQ ID NO: 833
  scaffold variant

SEQ ID NO: 1250 - DNA, 109 bp, Artificial Sequence; identical to SEQ ID NO: 802
  scaffold variant

SEQ ID NO: 1251 - DNA, 110 bp, Artificial Sequence
  scaffold variant
tactggcgcttttatctcattactttcgagagccatcaccagcgactatgtcgtatgggtaaagcgcttattatatcggagagaaatccgataaataagaagcatcaaag

SEQ ID NO: 1252 - DNA, 108 bp, Artificial Sequence
  scaffold variant
tacggcgcttttatctcattactttgagagccatcaccagcgactatgtcgtatgggtaaagcgcttattctatcggagagaaatccgataaataagaagcatcaaag

SEQ ID NO: 1253 - DNA, 108 bp, Artificial Sequence
  scaffold variant
tactggcgcttttattctcattactttgagagccatcaccagcgactatgtcgtatgggtaaagcgcttatttatcgtgagaaatccgataaataagaagcatcaaag

SEQ ID NO: 1254 - DNA, 106 bp, Artificial Sequence
  scaffold variant
gctggcgcttttatctcattactttgagagccatcaccagcgactatgtcgtatgggtaaagcgcttatttatcggagataatccgataaataagaagcatcaaag

SEQ ID NO: 1255 - DNA, 108 bp, Artificial Sequence
  scaffold variant
tactggcgcttttattctcattactttgagagccatcaccagcgactatgtcgtatgggtaaagcgcttatttattgagagaaatccgataaataagaagcatcaaag

SEQ ID NO: 1256 - DNA, 108 bp, Artificial Sequence
  scaffold variant
cctggcgcttttatctcattactttgagagccatcaccagcgactatgtcgtatgggtaaagcgcttattctatcggagagaaatccgataaataagaagcatcaaag

SEQ ID NO: 1257 - DNA, 107 bp, Artificial Sequence
  scaffold variant
tctggcgcttttatctcattactttgagagccatcaccagcgactatgtcgtatgggtaaagcgcttatttagcggagagaaatccgataaataagaagcatcaaag

SEQ ID NO: 1258 - DNA, 107 bp, Artificial Sequence; identical to SEQ ID NO: 507
  scaffold variant

SEQ ID NO: 1259 - DNA, 110 bp, Artificial Sequence
  scaffold variant
tactggcgcttttatctcattactttagagagccatcaccagcgactatgtcgtatgggtaaagcgcttatttatcggtagagaaatccgataaataagaagcatcaaag

SEQ ID NO: 1260 - DNA, 110 bp, Artificial Sequence
  scaffold variant
tactggcgcttttaatctcattactttgagagccatcaccagcgactatgtcgtatgggtaaagcgcttatttatcggcagagaaatccgataaataagaagcatcaaag

SEQ ID NO: 1261 - DNA, 110 bp, Artificial Sequence
  scaffold variant
tactggcgcttttatctcattactttgagagccatcaccagcgactatgtcgtatgggtaaagcgcttatttatgcggagagaaatccggataaataagaagcatcaaag

SEQ ID NO: 1262 - DNA, 107 bp, Artificial Sequence
  scaffold variant
cctggcgcttttatctcattactttgagagccatcaccagcgactatgtcgtatgggtaaagcgcttatttatcggagagaaatccgataaataagaagcatcaaag

SEQ ID NO: 1263 - DNA, 107 bp, Artificial Sequence
  scaffold variant
cctggcgcttttatctcattactttgagagccatcaccagcgactatgtcgtatgggtaaagcgcttatttatcggagagaaatccggtaaataagaagcatcaaag

SEQ ID NO: 1264 - DNA, 107 bp, Artificial Sequence
  scaffold variant
tacggcgcttttatctcattactttgagagccatcaccagcgactatgtcgtatgggtaaagcgcttatttatcggagaggaatccgataaataagaagcatcaaag

SEQ ID NO: 1265 - DNA, 105 bp, Artificial Sequence
  scaffold variant
tacggcgcttttatctcattactttgagagccatcaccagcgactatgtcgtatgggtaaagcgcttatttatcggggaaatccgataaataagaagcatcaaag

SEQ ID NO: 1266 - DNA, 110 bp, Artificial Sequence
  scaffold variant
taactggcgcttttatctcattactttgagagccatcaccagcgactatgtcgtatgggtaaagcgcttatttatcggagagaaatctcgataaataagaagcatcaaag

SEQ ID NO: 1267 - DNA, 110 bp, Artificial Sequence
  scaffold variant
tactggcgcttttatcttcattactttgagagccatcaccagcgactatgtcgtatgggtaaagcgcttatttatctggagagaaatccgataaataagaagcatcaaag

SEQ ID NO: 1268 - DNA, 110 bp, Artificial Sequence
  scaffold variant
tactggcgcttttatcgtcattactttgagagccatcaccagcgactatgtcgtatgggtaaagcgcttatttattcggagagaaatccgataaataagaagcatcaaag

SEQ ID NO: 1269 - DNA, 108 bp, Artificial Sequence
  scaffold variant
cctggcgcttttatctcattactttgagagccatcaccagcgactatgtcgtatgggtaaagcgcttatttgatcggagagaaatccgataaataagaagcatcaaag

SEQ ID NO: 1270 - DNA, 107 bp, Artificial Sequence; identical to SEQ ID NO: 483
  scaffold variant

SEQ ID NO: 1271 - DNA, 107 bp, Artificial Sequence; identical to SEQ ID NO: 1036
  scaffold variant

SEQ ID NO: 1272 - DNA, 109 bp, Artificial Sequence; identical to SEQ ID NO: 1010
  scaffold variant

SEQ ID NO: 1273 - DNA, 107 bp, Artificial Sequence
  scaffold variant
actggcgcttttatctcattactttgagagccatcaccagcgactatgtcgtatgggtaaagcgcttatttatcggatttctctccgataaataagaagcatcaaag

SEQ ID NO: 1274 - DNA, 108 bp, Artificial Sequence
  scaffold variant
atactggcgcttttatctcattactttgagagccatcaccagcgactatgtcgtatgggtaaagcgcttatttatcaagagaaatccgataaataagaagcatcaaag

SEQ ID NO: 1275 - DNA, 107 bp, Artificial Sequence; identical to SEQ ID NO: 990
  scaffold variant

SEQ ID NO: 1276 - DNA, 107 bp, Artificial Sequence; identical to SEQ ID NO: 1262
  scaffold variant

SEQ ID NO: 1277 - DNA, 107 bp, Artificial Sequence; identical to SEQ ID NO: 1091
  scaffold variant

SEQ ID NO: 1278 - DNA, 109 bp, Artificial Sequence; identical to SEQ ID NO: 518
  scaffold variant

SEQ ID NO: 1279 - DNA, 108 bp, Artificial Sequence; identical to SEQ ID NO: 374
  scaffold variant

SEQ ID NO: 1280 - DNA, 108 bp, Artificial Sequence
  scaffold variant
tactggcgcttttatctgcattactttgagagccatcaccagcgactatgtcgtatgggtaaagcgcttatttatcggagagaaatcgataaataagaagcatcaaag

SEQ ID NO: 1281 - DNA, 106 bp, Artificial Sequence
  scaffold variant
actggcgcttttatctcattactttgagagccatcaccagcgactatgtcgtatgggtaaagcattatttatcggagagaaatccgataaataagaagcatcaaag

SEQ ID NO: 1282 - DNA, 105 bp, Artificial Sequence
  scaffold variant
tctggcgcttttatctcattactttgagagccatcaccagcgactatgtcgtatgggtaaagcgcttatttatcggaggaatccgataaataagaagcatcaaag

SEQ ID NO: 1283 - DNA, 106 bp, Artificial Sequence; identical to SEQ ID NO: 487
  scaffold variant

SEQ ID NO: 1284 - DNA, 106 bp, Artificial Sequence; identical to SEQ ID NO: 1001
  scaffold variant

SEQ ID NO: 1285 - DNA, 110 bp, Artificial Sequence
  scaffold variant
tactggcgcttttatctctattactttgagagccatcaccagcgactatgtcgtatgggtaaagcgcttatttagtcggagagaaatccgataaataagaagcatcaaag

SEQ ID NO: 1286 - DNA, 107 bp, Artificial Sequence
  scaffold variant
tactggcgcttttatctcattactttgagagccatcaccagcgactatgtcgtatgggtaaagcgcttatttatcggagagattccgataaataagaagcatcaaag

SEQ ID NO: 1287 - DNA, 107 bp, Artificial Sequence
  scaffold variant
ctggcgcttttattctcattactttgagagccatcaccagcgactatgtcgtatgggtaaagcgcttatttatcggagagaaatccgataaataagaagcatcaaag

SEQ ID NO: 1288 - DNA, 107 bp, Artificial Sequence; identical to SEQ ID NO: 915
  scaffold variant

SEQ ID NO: 1289 - DNA, 109 bp, Artificial Sequence; identical to SEQ ID NO: 910
  scaffold variant

SEQ ID NO: 1290 - DNA, 108 bp, Artificial Sequence
  scaffold variant
tactggcgcttttatctctattactttgagagccatcaccagcgactatgtcgtatgggtaaagcgcttatttatcgggagaaatccgataaataagaagcatcaaag

SEQ ID NO: 1291 - DNA, 107 bp, Artificial Sequence; identical to SEQ ID NO: 1091
  scaffold variant

SEQ ID NO: 1292 - DNA, 106 bp, Artificial Sequence
  scaffold variant
tactggcgcttttatctattactttgagagccatcaccagcgactatgtcgtatgggtaaagcgcttatttatctagagaaatccgataaataagaagcatcaaag

SEQ ID NO: 1293 - DNA, 110 bp, Artificial Sequence
  scaffold variant
tactggcgcttttatctcattactttgagagccatcaccagcgactatgtcgtatgggtaaagcgcttatttatcgggagagaaatcccgataaataagaagcatcaaag

SEQ ID NO: 1294 - DNA, 105 bp, Artificial Sequence; identical to SEQ ID NO: 506
  scaffold variant

SEQ ID NO: 1295 - DNA, 106 bp, Artificial Sequence
  scaffold variant
tggcgcttttatctcattactttgagagccatcaccagcgactatgtcgtatgggtaaagcgcttatttatcgggagagaaatccgataaataagaagcatcaaag

SEQ ID NO: 1296 - DNA, 110 bp, Artificial Sequence
  scaffold variant
tactggcgcttttatctgcattactttgagagccatcaccagcgactatgtcgtatgggtaaagcgcttatttatccggagagaaatccgataaataagaagcatcaaag

SEQ ID NO: 1297 - DNA, 110 bp, Artificial Sequence
  scaffold variant
tactggcgcttttatctacattactttgagagccatcaccagcgactatgtcgtatgggtaaagcgcttatttatcgggagagaaatccgataaataagaagcatcaaag

SEQ ID NO: 1298 - DNA, 108 bp, Artificial Sequence
  scaffold variant
tactggcgcttttatctcattactttgagagccatcaccagcgactatgtcgtatgggtaaagcggtatttatcgggagagaaatccgataaataagaagcatcaaag

SEQ ID NO: 1299 - DNA, 108 bp, Artificial Sequence
  scaffold variant
tactggcgcttttatcctcattactttgagagccatcaccagcgactatgtcgtatgggtaaagcgcttatttatcggaagaaatccgataaataagaagcatcaaag

SEQ ID NO: 1300 - DNA, 108 bp, Artificial Sequence
  scaffold variant
tactggcgcttttatctcattactttgagagccatcaccagcgactatgtcgtatgggtaaagcgcttatttatcggagagaaatctgataaataagaagcatcaaag

SEQ ID NO: 1301 - DNA, 109 bp, Artificial Sequence; identical to SEQ ID NO: 1183
  scaffold variant

SEQ ID NO: 1302 - DNA, 110 bp, Artificial Sequence
  scaffold variant
tactggcgcttttatcgtcattactttgagagccatcaccagcgactatgtcgtatgggtaaagcgcttatttatccggagagaaatccgataaataagaagcatcaaag

SEQ ID NO: 1303 - DNA, 108 bp, Artificial Sequence
  scaffold variant
tactggcgcttttatcctcattactttgagagccatcaccagcgactatgtcgtatgggtaaagcgcttatttatcgcgagaaatccgataaataagaagcatcaaag

SEQ ID NO: 1304 - DNA, 110 bp, Artificial Sequence
  scaffold variant
tactggcgcttttaatctcattactttgagagccatcaccagcgactatgtcgtatgggtaaagcgcttatttatccggagagaaatccgataaataagaagcatcaaag

SEQ ID NO: 1305 - DNA, 107 bp, Artificial Sequence; identical to SEQ ID NO: 1218
  scaffold variant

SEQ ID NO: 1306 - DNA, 108 bp, Artificial Sequence
  scaffold variant
tactggcgcttttatctcattactttgagagccatcaccagcgactatgtcgtatgggtaaagcggtatttatcggagagaaatcgcgataaataagaagcatcaaag

SEQ ID NO: 1307 - DNA, 108 bp, Artificial Sequence; identical to SEQ ID NO: 442
  scaffold variant

SEQ ID NO: 1308 - DNA, 108 bp, Artificial Sequence
  scaffold variant
tactggcgcttttatcatcattactttgagagccatcaccagcgactatgtcgtatgggtaaagcgcttatttatcaagagaaatccgataaataagaagcatcaaag

SEQ ID NO: 1309 - DNA, 107 bp, Artificial Sequence; identical to SEQ ID NO: 925
  scaffold variant

SEQ ID NO: 1310 - DNA, 109 bp, Artificial Sequence; identical to SEQ ID NO: 1145
  scaffold variant

SEQ ID NO: 1311 - DNA, 107 bp, Artificial Sequence; identical to SEQ ID NO: 915
  scaffold variant

SEQ ID NO: 1312 - DNA, 108 bp, Artificial Sequence
  scaffold variant
tacggcgcttttatctcattactttgagagccatcaccagcgactatgtcgtatgggtaaagcgcttatttatcggagagaatatccgataaataagaagcatcaaag

SEQ ID NO: 1313 - DNA, 110 bp, Artificial Sequence
  scaffold variant
tactggcgcttttatctctattactttgagagccatcaccagcgactatgtcgtatgggtaaagcgcttattctatcggagagaaatccgataaataagaagcatcaaag

SEQ ID NO: 1314 - DNA, 110 bp, Artificial Sequence
  scaffold variant
tactggcgcttttatctcattactttgagagccatcaccagcgactatgtcgtatgggtaaagcgcttatttattcggagagaaatcgcgataaataagaagcatcaaag

SEQ ID NO: 1315 - DNA, 107 bp, Artificial Sequence; identical to SEQ ID NO: 915
  scaffold variant

SEQ ID NO: 1316 - DNA, 106 bp, Artificial Sequence
  scaffold variant
ctggcgcttttatctcattactttgagagccatcaccagcgactatgtcgtatgggtaaagcgcttatttagcggagagaaatccgataaataagaagcatcaaag

SEQ ID NO: 1317 - DNA, 107 bp, Artificial Sequence; identical to SEQ ID NO: 1262
  scaffold variant

SEQ ID NO: 1318 - DNA, 106 bp, Artificial Sequence
  scaffold variant
tctggcgcttttatctcattactttgagagccatcaccagcgactatgtcgtatgggtaaagctttatttatcggagagaaatccgataaataagaagcatcaaag

SEQ ID NO: 1319 - DNA, 108 bp, Artificial Sequence
  scaffold variant
ctactggcgcttttatctcattactttgagagccatcaccagcgactatgtcgtatgggtaaagcgcttatttacggagagaaatccgataaataagaagcatcaaag

SEQ ID NO: 1320 - DNA, 110 bp, Artificial Sequence
  scaffold variant
tactggcgcttttatctgcattactttgagagccatcaccagcgactatgtcgtatgggtaaagcgcttatttatcggagagaaatgccgataaataagaagcatcaaag

SEQ ID NO: 1321 - DNA, 110 bp, Artificial Sequence
  scaffold variant
tactggcgcttttatcctcattactttgagagccatcaccagcgactatgtcgtatgggtaaagcgcttatttatccggagagaaatccgataaataagaagcatcaaag

SEQ ID NO: 1322 - DNA, 110 bp, Artificial Sequence
  scaffold variant
tactggcgcttttatcttcattactttgagagccatcaccagcgactatgtcgtatgggtaaagcgcttatttatcggagagaaatccgcataaataagaagcatcaaag

SEQ ID NO: 1323 - DNA, 109 bp, Artificial Sequence; identical to SEQ ID NO: 1183
  scaffold variant

SEQ ID NO: 1324 - DNA, 108 bp, Artificial Sequence
  scaffold variant
tctggcgcttttatctgcattactttgagagccatcaccagcgactatgtcgtatgggtaaagcgcttatttatcggagagaaatccgataaataagaagcatcaaag

SEQ ID NO: 1325 - DNA, 110 bp, Artificial Sequence
  scaffold variant
tactggcgcttttatctcattactttgagagccatcaccagcgactatgtcgtatgggtaaagcgcttatttatccggagagaaatccgataaataagaaagcatcaaag

SEQ ID NO: 1326 - DNA, 110 bp, Artificial Sequence
  scaffold variant
ctactggcgcttttatctcattactttgagagccatcaccagcgactatgtcgtatgggtaaagcgcttatttatcggagagaaatcctgataaataagaagcatcaaag

SEQ ID NO: 1327 - DNA, 107 bp, Artificial Sequence
  scaffold variant
tactggcgcttttatactcattactttgagagccatcaccagcgactatgtcgtatgggtaaagcgcttatttatcggagaaatccgataaataagaagcatcaaag

SEQ ID NO: 1328 - DNA, 110 bp, Artificial Sequence
  scaffold variant
tactggcgcttttatctcattactttcgagagccatcaccagcgactatgtcgtatgggtaaagcgcttatttatcggagagataatccgataaataagaagcatcaaag

SEQ ID NO: 1329 - DNA, 110 bp, Artificial Sequence
  scaffold variant
ctactggcgcttttatctcattactttgagagccatcaccagcgactatgtcgtatgggtaaagcgcttatttatccggagagaaatccgataaataagaagcatcaaag

SEQ ID NO: 1330 - DNA, 108 bp, Artificial Sequence
  scaffold variant
tactggcgcttttatctgcattactttgagagccatcaccagcgactatgtcgtatgggtaaagcgcttatttatcgagagaaatccgataaataagaagcatcaaag

SEQ ID NO: 1331 - DNA, 107 bp, Artificial Sequence
  scaffold variant
cctggcgcttttatctcattactttgagagccatcaccagcgactatgtcgtatgggtaaagcgcttatttatcggagagaaatccgctaaataagaagcatcaaag

SEQ ID NO: 1332 - DNA, 106 bp, Artificial Sequence; identical to SEQ ID NO: 459
  scaffold variant

SEQ ID NO: 1333 - DNA, 110 bp, Artificial Sequence
  scaffold variant
tactggcgcttttatctcattactttgagagccatcaccagcgactatgtcgtatgggtaaagcgcttatttagtcggagagaaatcgcgataaataagaagcatcaaag

SEQ ID NO: 1334 - DNA, 108 bp, Artificial Sequence
  scaffold variant
tactggcgcttttatcttcattactttgagagccatcaccagcgactatgtcgtatgggtaaagcgcttatttatcggaagaaatccgataaataagaagcatcaaag

SEQ ID NO: 1335 - DNA, 107 bp, Artificial Sequence; identical to SEQ ID NO: 915
  scaffold variant

SEQ ID NO: 1336 - DNA, 107 bp, Artificial Sequence; identical to SEQ ID NO: 833
  scaffold variant

SEQ ID NO: 1337 - DNA, 107 bp, Artificial Sequence
  scaffold variant
tactggcgcttttatctcattactttgagagccatcaccagcgactatgtcgtatgggtaaagcgcttatttacggagagaaatccgataaataagaagcatcaaag

SEQ ID NO: 1338 - DNA, 109 bp, Artificial Sequence; identical to SEQ ID NO: 912
  scaffold variant

SEQ ID NO: 1339 - DNA, 110 bp, Artificial Sequence
  scaffold variant
tactggcgcttttatcctcattactttgagagccatcaccagcgactatgtcgtatgggtaaagcgcttatttatcggagagaaatccgcataaataagaagcatcaaag

SEQ ID NO: 1340 - DNA, 109 bp, Artificial Sequence; identical to SEQ ID NO: 740
  scaffold variant

SEQ ID NO: 1341 - DNA, 110 bp, Artificial Sequence
  scaffold variant
tactggcgcttttattctcattactttgagagccatcaccagcgactatgtcgtatgggtaaagcgcttatttatcggagagaaatccgaataaataagaagcatcaaag

SEQ ID NO: 1342 - DNA, 108 bp, Artificial Sequence
  scaffold variant
cctggcgcttttatctcattactttgagagccatcaccagcgactatgtcgtatgggtaaagcgcttatttatcggagagagaatccgataaataagaagcatcaaag

SEQ ID NO: 1343 - DNA, 107 bp, Artificial Sequence
  scaffold variant
tctggcgcttttatctcattactttgagagccatcaccagcgactatgtcgtatgggtaaagcgcttatttatcggggagaaatccgataaataagaagcatcaaag

SEQ ID NO: 1344 - DNA, 108 bp, Artificial Sequence
  scaffold variant
tctggcgcttttatctcattactttgagagccatcaccagcgactatgtcgtatgggtaaagcgcttatttatcgcgagagaaatccgataaataagaagcatcaaag

SEQ ID NO: 1345 - DNA, 107 bp, Artificial Sequence
  scaffold variant
ctggcgcttttatctcattactttgagagccatcaccagcgactatgtcgtatgggtaaagcgcttattttatcggagagaaatccgataaataagaagcatcaaag

SEQ ID NO: 1346 - DNA, 110 bp, Artificial Sequence
  scaffold variant
tactggcgcttttatctcattactttgagagccatcaccagcgactatgtcgtatgggtaaagcgcttatttatccggagagaaatcacgataaataagaagcatcaaag

SEQ ID NO: 1347 - DNA, 109 bp, Artificial Sequence; identical to SEQ ID NO: 837
  scaffold variant

SEQ ID NO: 1348 - DNA, 108 bp, Artificial Sequence
  scaffold variant
tactggcgcttttatctcattactttgagagccatcaccagcgactatgtcgtattgggtaaagcgcttatttatcggaggaaatccgataaataagaagcatcaaag

SEQ ID NO: 1349 - DNA, 104 bp, Artificial Sequence
  scaffold variant
tggcgcttttatctcattactttgagagccatcaccagcgactatgtcgtatgggtaaagcgcttatttatcggaagaaatccgataaataagaagcatcaaag

SEQ ID NO: 1350 - DNA, 109 bp, Artificial Sequence; identical to SEQ ID NO: 941
  scaffold variant

SEQ ID NO: 1351 - DNA, 106 bp, Artificial Sequence; identical to SEQ ID NO: 385
  scaffold variant

SEQ ID NO: 1352 - DNA, 106 bp, Artificial Sequence
  scaffold variant
actggcgcttttatctcattactttgagagccatcaccagcgactatgtcgtatgggtaaagcgcttatttatggagagaaatccgataaataagaagcatcaaag

SEQ ID NO: 1353 - DNA, 105 bp, Artificial Sequence; identical to SEQ ID NO: 428
  scaffold variant

SEQ ID NO: 1354 - DNA, 106 bp, Artificial Sequence
  scaffold variant
tactggcgcttttatctcattactttgagagccatcaccagcgactatgtcgtatgggtaaagcgcttatttatcggagatatccgataaataagaagcatcaaag

SEQ ID NO: 1355 - DNA, 107 bp, Artificial Sequence; identical to SEQ ID NO: 1036
  scaffold variant

SEQ ID NO: 1356 - DNA, 107 bp, Artificial Sequence
  scaffold variant
tactggcgcttttatctcattactttgagagccatcaccagcgactatgtcgtatgggtaaagcgcttatttatttagagaaatccgataaataagaagcatcaaag

SEQ ID NO: 1357 - DNA, 106 bp, Artificial Sequence
  scaffold variant
tacggcgcttttatctcattactttgagagccatcaccagcgactatgtcgtatgggtaaagcgcttatttccggagagaaatccgataaataagaagcatcaaag

SEQ ID NO: 1358 - DNA, 110 bp, Artificial Sequence
  scaffold variant
tactggcgcttttatctcgattactttgagagccatcaccagcgactatgtcgtatgggtaaagcgcttattctatcggagagaaatccgataaataagaagcatcaaag

SEQ ID NO: 1359 - DNA, 105 bp, Artificial Sequence
  scaffold variant
ctggcgcttttatctcattactttgagagccatcaccagcgactatgtcgtatgggtaaagcgcttatttatagagagaaatccgataaataagaagcatcaaag

SEQ ID NO: 1360 - DNA, 108 bp, Artificial Sequence
  scaffold variant
tactggcgcttttatctcattactttgagagccatcaccagcgactatgtcgtatgggtaaagcgcttatttattcggagagaaatcgataaataagaagcatcaaag

SEQ ID NO: 1361 - DNA, 109 bp, Artificial Sequence; identical to SEQ ID NO: 1010
  scaffold variant

SEQ ID NO: 1362 - DNA, 106 bp, Artificial Sequence
  scaffold variant
gctggcgcttttatctcattactttgagagccatcaccagcgactatgtcgtatgggtaaagcgcttatttatcggcagaaatccgataaataagaagcatcaaag

SEQ ID NO: 1363 - DNA, 108 bp, Artificial Sequence; identical to SEQ ID NO: 573
  scaffold variant

SEQ ID NO: 1364 - DNA, 107 bp, Artificial Sequence; identical to SEQ ID NO: 515
  scaffold variant

SEQ ID NO: 1365 - DNA, 108 bp, Artificial Sequence
  scaffold variant
tactggcgcttttatctcattactttgagagccatcaccagcgactatgtcgtatgggtaaagcgcttatttatcggagagaaatccgataaataagaagcatcaaag

SEQ ID NO: 1366 - DNA, 107 bp, Artificial Sequence; identical to SEQ ID NO: 833
  scaffold variant

SEQ ID NO: 1367 - DNA, 106 bp, Artificial Sequence; identical to SEQ ID NO: 1295
  scaffold variant

SEQ ID NO: 1368 - DNA, 106 bp, Artificial Sequence
  scaffold variant
ctggcgcttttatctcattactttgagagccatcaccagcgactatgtcgtatgggtaaagcgcttatttatcggagagaaatccggtaaataagaagcatcaaag

SEQ ID NO: 1369 - DNA, 107 bp, Artificial Sequence
  scaffold variant
gctggcgcttttatctcattactttgagagccatcaccagcgactatgtcgtatgggtaaagcgcttatttctcggagagaaatccgataaataagaagcatcaaag

SEQ ID NO: 1370 - DNA, 106 bp, Artificial Sequence
  scaffold variant
actggcgcttttatctcattactttgagagccatcaccagcgactatgtcgtatgggtaaagcgcttatttatagagagaaatccgataaataagaagcatcaaag

SEQ ID NO: 1371 - DNA, 105 bp, Artificial Sequence
  scaffold variant
tcggcgcttttatctcattactttgagagccatcaccagcgactatgtcgtatgggtaaagcgcttatttatccagagaaatccgataaataagaagcatcaaag

SEQ ID NO: 1372 - DNA, 107 bp, Artificial Sequence; identical to SEQ ID NO: 1262
  scaffold variant

SEQ ID NO: 1373 - DNA, 108 bp, Artificial Sequence
  scaffold variant
tactggcgcttttatcttcattactttgagagccatcaccagcgactatgtcgtatgggtaaagcgcttatttccggagagaaatccgataaataagaagcatcaaag

SEQ ID NO: 1374 - DNA, 109 bp, Artificial Sequence
  scaffold variant
tactggcgcttttattctcattactttgagagccatcaccagcgactatgtcgtatgggtaaagcgcttatttatcggggagaaatccgataaataagaagcatcaaag

SEQ ID NO: 1375 - DNA, 106 bp, Artificial Sequence
  scaffold variant
cctggcgcttttatctcattactttgagagccatcaccagcgactatgtcgtatgggtaaagcgatatttatcggagagaaatccgataaataagaagcatcaaag

SEQ ID NO: 1376 - DNA, 105 bp, Artificial Sequence; identical to SEQ ID NO: 608
  scaffold variant

SEQ ID NO: 1377 - DNA, 108 bp, Artificial Sequence
  scaffold variant
tacggcgcttttatctcattactttgagagccatcaccagcgactatgtcgtatgggtaaagcgcttatttatcggagagaaatccgattaaataagaagcatcaaag

SEQ ID NO: 1378 - DNA, 107 bp, Artificial Sequence; identical to SEQ ID NO: 1337
  scaffold variant

SEQ ID NO: 1379 - DNA, 110 bp, Artificial Sequence
  scaffold variant
tactggcgcttttaatctcattactttgagagccatcaccagcgactatgtcgtagtgggtaaagcgcttatttatcggagagaaatccgataaataagaagcatcaaag

SEQ ID NO: 1380 - DNA, 106 bp, Artificial Sequence
  scaffold variant
tacggcgcttttatctcattactttgagagccatcaccagcgactatgtcgtatgggtaaagcgcttatttatcggagagaatccgataaataagaagcatcaaag

SEQ ID NO: 1381 - DNA, 108 bp, Artificial Sequence
  scaffold variant
actggcgcttttatctcattactttgagagccatcaccagcgactatgtcgtatgggtaaagcgcttatttatcggagagagaatccgataaataagaagcatcaaag

SEQ ID NO: 1382 - DNA, 110 bp, Artificial Sequence
  scaffold variant
tactggcgcttttatcctcattactttgagagccatcaccagcgactatgtcgtatgggtaaagcgcttattttatcggagagaaatccgataaataagaagcatcaaag

SEQ ID NO: 1383 - DNA, 108 bp, Artificial Sequence
  scaffold variant
cctggcgcttttatctcattactttgagagccatcaccagcgactatgtcgtatgggtaaagcgcttatcttatcggagagaaatccgataaataagaagcatcaaag

SEQ ID NO: 1384 - DNA, 108 bp, Artificial Sequence
  scaffold variant
tactggcgcttttatctgcattactttgagagccatcaccagcgactatgtcgtatgggtaaagcgcttatttatcggagagcatccgataaataagaagcatcaaag

SEQ ID NO: 1385 - DNA, 109 bp, Artificial Sequence; identical to SEQ ID NO: 740
  scaffold variant

SEQ ID NO: 1386 - DNA, 108 bp, Artificial Sequence
  scaffold variant
gctggcgcttttatctgcattactttgagagccatcaccagcgactatgtcgtatgggtaaagcgcttatttatcggagagaaatccgataaataagaagcatcaaag

SEQ ID NO: 1387 - DNA, 109 bp, Artificial Sequence
  scaffold variant
tactggcgcttttatctcattactttgagagccatcaccagcgactatgtcgtatgggtaaagcgcttatttatcggagagaaatccgtataaataagaagcatcaaag

SEQ ID NO: 1388 - DNA, 107 bp, Artificial Sequence
  scaffold variant
ctggcgcttttatctcattactttgagagccatcaccagcgactatgtcgtatgggtaaagcgcttatttatcggagagataatccgataaataagaagcatcaaag

SEQ ID NO: 1389 - DNA, 108 bp, Artificial Sequence
  scaffold variant
tactggcgcttttattcattactttgagagccatcaccagcgactatgtcgtatgggtaaagcgcttatttatcgggagagaaatccgataaataagaagcatcaaag

SEQ ID NO: 1390 - DNA, 105 bp, Artificial Sequence; identical to SEQ ID NO: 524
  scaffold variant

SEQ ID NO: 1391 - DNA, 108 bp, Artificial Sequence
  scaffold variant
tactggcgcttttatctcgattactttgagagccatcaccagcgactatgtcgtatgggtaaagcgcttatttatcgggagaaatccgataaataagaagcatcaaag

SEQ ID NO: 1392 - DNA, 107 bp, Artificial Sequence; identical to SEQ ID NO: 1036
  scaffold variant

SEQ ID NO: 1393 - DNA, 105 bp, Artificial Sequence
  scaffold variant
atggcgcttttatctcattactttgagagccatcaccagcgactatgtcgtatgggtaaagcgcttatttatcggagagagtccgataaataagaagcatcaaag

SEQ ID NO: 1394 - DNA, 108 bp, Artificial Sequence
  scaffold variant
tctggcgcttttatctcattactttgagagccatcaccagcgactatgtcgtatgggtaaagcgcttatttatcggagagaaatccgataaataagtaagcatcaaag

SEQ ID NO: 1395 - DNA, 108 bp, Artificial Sequence
  scaffold variant
tactggcgcttttatctcattactttgagagccatcaccagcgactatgtcgtatgggtaaagcgcttatttatgcggagagaatccgataaataagaagcatcaaag

SEQ ID NO: 1396 - DNA, 107 bp, Artificial Sequence
  scaffold variant
actggcgcttttatctcattactttgagagccatcaccagcgactatgtcgtatgggtaaagcgcttatttatcggagagaaatccggtaaataagaagcatcaaag

SEQ ID NO: 1397 - DNA, 106 bp, Artificial Sequence
  scaffold variant
tacggcgcttttatctcattactttgagagccatcaccagcgactatgtcgtatgggtaaagcgcttatttatagagagaaatccgataaataagaagcatcaaag

SEQ ID NO: 1398 - DNA, 110 bp, Artificial Sequence
  scaffold variant
tactggcgcttttatcctcattactttgagagccatcaccagcgactatgtcgtatgggtaaagcgcttatttatcggagagaaaatccgataaataagaagcatcaaag

SEQ ID NO: 1399 - DNA, 109 bp, Artificial Sequence; identical to SEQ ID NO: 980
  scaffold variant

SEQ ID NO: 1400 - DNA, 110 bp, Artificial Sequence
  scaffold variant
tactggcgcttttatcatcattactttgagagccatcaccagcgactatgtcgtatgggtaaagcgcttatttagtcggagagaaatccgataaataagaagcatcaaag

SEQ ID NO: 1401 - DNA, 107 bp, Artificial Sequence; identical to SEQ ID NO: 1218
  scaffold variant

SEQ ID NO: 1402 - DNA, 105 bp, Artificial Sequence; identical to SEQ ID NO: 408
  scaffold variant

SEQ ID NO: 1403 - DNA, 107 bp, Artificial Sequence
  scaffold variant
tacggcgcttttatctcattactttgagagccatcaccagcgactatgtcgtatgggtaaagcgcttatttctcggagagaaatccgataaataagaagcatcaaag

SEQ ID NO: 1404 - DNA, 105 bp, Artificial Sequence; identical to SEQ ID NO: 478
  scaffold variant

SEQ ID NO: 1405 - DNA, 109 bp, Artificial Sequence; identical to SEQ ID NO: 912
  scaffold variant

SEQ ID NO: 1406 - DNA, 109 bp, Artificial Sequence; identical to SEQ ID NO: 1183
  scaffold variant

SEQ ID NO: 1407 - DNA, 108 bp, Artificial Sequence
  scaffold variant
tactggcgcttttatcctcattactttgagagccatcaccagcgactatgtcgtatgggtaaagcgcttatttgcggagagaaatccgataaataagaagcatcaaag

SEQ ID NO: 1408 - DNA, 107 bp, Artificial Sequence
  scaffold variant
ctggcgcttttatctcattactttgagagccatcaccagcgactatgtcgtatgggtaaagcgcttatttatcggagagaaatccgataaataagtaagcatcaaag

SEQ ID NO: 1409 - DNA, 108 bp, Artificial Sequence
  scaffold variant
tactggcgcttttatcctcattactttgagagccatcaccagcgactatgtcgtatgggtaaagcgcttatttatcggagagtatccgataaataagaagcatcaaag

SEQ ID NO: 1410 - DNA, 110 bp, Artificial Sequence
  scaffold variant
tactggcgcttttatctcattactttagagagccatcaccagcgactatgtcgtatgggtaaagcgcttatttaatcggagagaaatccgataaataagaagcatcaaag

SEQ ID NO: 1411 - DNA, 108 bp, Artificial Sequence
  scaffold variant
tctggcgcttttatctctattactttgagagccatcaccagcgactatgtcgtatgggtaaagcgcttatttatcggagagaaatccgataaataagaagcatcaaag

SEQ ID NO: 1412 - DNA, 108 bp, Artificial Sequence
  scaffold variant
actggcgcttttatctcattactttgagagccatcaccagcgactatgtcgtatgggtaaagcgcttatttatcggagagaaatccgataaataagaaagcatcaaag

SEQ ID NO: 1413 - DNA, 108 bp, Artificial Sequence
  scaffold variant
tactggcgcttttatcttcattactttgagagccatcaccagcgactatgtcgtatgggtaaagcggtatttatcggagagaaatccgataaataagaagcatcaaag

SEQ ID NO: 1414 - DNA, 109 bp, Artificial Sequence; identical to SEQ ID NO: 1010
  scaffold variant

SEQ ID NO: 1415 - DNA, 105 bp, Artificial Sequence
  scaffold variant
ctggcgcttttatctcattactttgagagccatcaccagcgactatgtcgtatgggtaaagcgcttatttatcggagtaaatccgataaataagaagcatcaaag

SEQ ID NO: 1416 - DNA, 108 bp, Artificial Sequence
  scaffold variant
tactggcgcttttattctcattactttgagagccatcaccagcgactatgtcgtatgggtaaagcgcttatttatcggagagaatccgataaataagaagcatcaaag

SEQ ID NO: 1417 - DNA, 109 bp, Artificial Sequence; identical to SEQ ID NO: 912
  scaffold variant

SEQ ID NO: 1418 - DNA, 106 bp, Artificial Sequence
  scaffold variant
tctggcgcttttatctcattactttgagagccatcaccagcgactatgtcgtatgggtaaagcgcttatttgcggagagaaatccgataaataagaagcatcaaag

SEQ ID NO: 1419 - DNA, 110 bp, Artificial Sequence
  scaffold variant
tactggcgcttttatcctcattactttgagagccatcaccagcgactatgtcgtatgggtaaagcgcttatttatcggagagaaatcccgataaataagaagcatcaaag

SEQ ID NO: 1420 - DNA, 106 bp, Artificial Sequence
  scaffold variant
actggcgcttttatctcattactttgagagccatcaccagcgactatgtcgtatgggtaaagcgcttatttatcggagagaaattgataaataagaagcatcaaag

SEQ ID NO: 1421 - DNA, 106 bp, Artificial Sequence
  scaffold variant
tactggcgcttttatctcattactttgagagccatcaccagcgactatgtcgtatgggtaaagcgcttatttatcggggaaatccgataaataagaagcatcaaag

SEQ ID NO: 1422 - DNA, 106 bp, Artificial Sequence
  scaffold variant
ctggcgcttttatctcattactttgagagccatcaccagcgactatgtcgtatgggtaaagcgcttatttctcggagagaaatccgataaataagaagcatcaaag

SEQ ID NO: 1423 - DNA, 110 bp, Artificial Sequence; identical to SEQ ID NO: 639
  scaffold variant

SEQ ID NO: 1424 - DNA, 107 bp, Artificial Sequence; identical to SEQ ID NO: 1097
  scaffold variant

SEQ ID NO: 1425 - DNA, 108 bp, Artificial Sequence
  scaffold variant
ctactggcgcttttatctcattactttgagagccatcaccagcgactatgtcgtatgggtaaagcgcttatttatcggagacaatccgataaataagaagcatcaaag

SEQ ID NO: 1426 - DNA, 107 bp, Artificial Sequence
  scaffold variant
tactggcgcttttatctcattactttgagagccatcaccagcgactatgtcgtatgggtaaagcgcttatttatcggagataatccgataaataagaagcatcaaag

SEQ ID NO: 1427 - DNA, 110 bp, Artificial Sequence
  scaffold variant
tactggcgcttttatcgtcattactttgagagccatcaccagcgactatgtcgtatgggtaaagcgcttatttatcggcagagaaatccgataaataagaagcatcaaag

SEQ ID NO: 1428 - DNA, 108 bp, Artificial Sequence
  scaffold variant
tactggcgcttttatctcattactttgagagccatcaccagcgactatgtcgtatgggtaaagcgcttatttatcggtgagaaatccgataaataagaagcatcaaag

SEQ ID NO: 1429 - DNA, 108 bp, Artificial Sequence
  scaffold variant
actggcgcttttatctcattactttgagagccatcaccagcgactatgtcgtatgggtaaagcgcttattttatcggagagaaatccgataaataagaagcatcaaag

SEQ ID NO: 1430 - DNA, 108 bp, Artificial Sequence
  scaffold variant
tactggcgcttttatctgcattactttgagagccatcaccagcgactatgtcgtatgggtaaagcgcttatttattgagagaaatccgataaataagaagcatcaaag

SEQ ID NO: 1431 - DNA, 107 bp, Artificial Sequence; identical to SEQ ID NO: 833
  scaffold variant

SEQ ID NO: 1432 - DNA, 109 bp, Artificial Sequence; identical to SEQ ID NO: 1183
  scaffold variant

SEQ ID NO: 1433 - DNA, 105 bp, Artificial Sequence; identical to SEQ ID NO: 428
  scaffold variant

SEQ ID NO: 1434 - DNA, 107 bp, Artificial Sequence; identical to SEQ ID NO: 990
  scaffold variant

SEQ ID NO: 1435 - DNA, 108 bp, Artificial Sequence
  scaffold variant
tactggcgcttttatctgcattactttgagagccatcaccagcgactatgtcgtatgggtaaagctttatttatcggagagaaatccgataaataagaagcatcaaag

SEQ ID NO: 1436 - DNA, 108 bp, Artificial Sequence
  scaffold variant
cctggcgcttttatctcattactttgagagccatcaccagcgactatgtcgtatgggtaaagcgcttatttatcggagagaaatccggataaataagaagcatcaaag

SEQ ID NO: 1437 - DNA, 107 bp, Artificial Sequence; identical to SEQ ID NO: 990
  scaffold variant

SEQ ID NO: 1438 - DNA, 108 bp, Artificial Sequence
  scaffold variant
tacggcgcttttatctcattactttgagagccatcaccagcgactatgtcgtatgggtaaagcgcttatttatcggagagaacatccgataaataagaagcatcaaag

SEQ ID NO: 1439 - DNA, 108 bp, Artificial Sequence
  scaffold variant
tctggcgcttttatctcattactttgagagccatcaccagcgactatgtcgtatgggtaaagcgcttatttatcggagagaaatccggataaataagaagcatcaaag

SEQ ID NO: 1440 - DNA, 106 bp, Artificial Sequence
  scaffold variant
taaggcgcttttatctcattactttgagagccatcaccagcgactatgtcgtatgggtaaagcgcttatttatcaagagaaatccgataaataagaagcatcaaag

SEQ ID NO: 1441 - DNA, 108 bp, Artificial Sequence
  scaffold variant
tactggcgcttttatcctcattactttgagagccatcaccagcgactatgtcgtatgggtaaagcgcttatttatcggagacaatccgataaataagaagcatcaaag

SEQ ID NO: 1442 - DNA, 107 bp, Artificial Sequence; identical to SEQ ID NO: 1262
  scaffold variant

SEQ ID NO: 1443 - DNA, 108 bp, Artificial Sequence
  scaffold variant
cctggcgcttttatctcattactttgagagccatcaccagcgactatgtcgtatgggtaaagcgcttatttatcggagagaaatccgataaataagaaagcatcaaag

SEQ ID NO: 1444 - DNA, 105 bp, Artificial Sequence
  scaffold variant
actggcgcttttatctcattactttgagagccatcaccagcgactatgtcgtatgggtaaagcgcttatttatcggtgaaatccgataaataagaagcatcaaag

SEQ ID NO: 1445 - DNA, 109 bp, Artificial Sequence; identical to SEQ ID NO: 980
  scaffold variant

SEQ ID NO: 1446 - DNA, 109 bp, Artificial Sequence; identical to SEQ ID NO: 518
  scaffold variant

SEQ ID NO: 1447 - DNA, 106 bp, Artificial Sequence
  scaffold variant
tctggcgcttttatctcattactttgagagccatcaccagcgactatgtcgtatgggtaaagcgatatttatcggagagaaatccgataaataagaagcatcaaag

SEQ ID NO: 1448 - DNA, 107 bp, Artificial Sequence
  scaffold variant
ctggcgcttttatctctattactttgagagccatcaccagcgactatgtcgtatgggtaaagcgcttatttatcggagagaaatccgataaataagaagcatcaaag

SEQ ID NO: 1449 - DNA, 110 bp, Artificial Sequence
  scaffold variant
tactggcgcttttatcttcattactttgagagccatcaccagcgactatgtcgtatgggtaaagcgcttattgtatcggagagaaatccgataaataagaagcatcaaag

SEQ ID NO: 1450 - DNA, 107 bp, Artificial Sequence
  scaffold variant
cctggcgcttttatctcattactttgagagccatcaccagcgactatgtcgtatgggtaaagcgcttatttatcggagagaaatccgatatataagaagcatcaaag

SEQ ID NO: 1451 - DNA, 106 bp, Artificial Sequence
  scaffold variant
gatggcgcttttatctcattactttgagagccatcaccagcgactatgtcgtatgggtaaagcgcttatttatggagagaaatccgataaataagaagcatcaaag

SEQ ID NO: 1452 - DNA, 110 bp, Artificial Sequence
  scaffold variant
tactggcgcttttatactcattactttgagagccatcaccagcgactatgtcgtatgggtaaagcgcttatttatccggagagaaatccgataaataagaagcatcaaag

SEQ ID NO: 1453 - DNA, 108 bp, Artificial Sequence
  scaffold variant
cctggcgcttttatctcattactttgagagccatcaccagcgactatgtcgtatgggtaaagcgcttatttatcggagagataatccgataaataagaagcatcaaag

SEQ ID NO: 1454 - DNA, 108 bp, Artificial Sequence
  scaffold variant
tactggcgcttttatcctcattactttgagagccatcaccagcgactatgtcgtatgggtaaagcgcttatttatcggagagaaatccgtaaataagaagcatcaaag

SEQ ID NO: 1455 - DNA, 108 bp, Artificial Sequence
  scaffold variant
tactggcgcttttatctctattactttgagagccatcaccagcgactatgtcgtatgggtaaagcgcttatttatcggagagaaatccgaaaataagaagcatcaaag

SEQ ID NO: 1456 - DNA, 105 bp, Artificial Sequence
  scaffold variant
ctggcgcttttatctcattactttgagagccatcaccagcgactatgtcgtatgggtaaagcgcttatttatcggagagaaatccggaaataagaagcatcaaag

SEQ ID NO: 1457 - DNA, 106 bp, Artificial Sequence
  scaffold variant
ctggcgcttttatctcattactttgagagccatcaccagcgactatgtcgtatgggtaaagcgcttatttatcggggagaaatccgataaataagaagcatcaaag

SEQ ID NO: 1458 - DNA, 106 bp, Artificial Sequence; identical to SEQ ID NO: 459
  scaffold variant

SEQ ID NO: 1459 - DNA, 107 bp, Artificial Sequence; identical to SEQ ID NO: 833
  scaffold variant

SEQ ID NO: 1460 - DNA, 107 bp, Artificial Sequence; identical to SEQ ID NO: 990
  scaffold variant

SEQ ID NO: 1461 - DNA, 110 bp, Artificial Sequence
  scaffold variant
ctactggcgcttttatctcattactttgagagccatcaccagcgactatgtcgtatgggtaaagcgcttatttatcggagagaaatctcgataaataagaagcatcaaag

SEQ ID NO: 1462 - DNA, 105 bp, Artificial Sequence; identical to SEQ ID NO: 880
  scaffold variant

SEQ ID NO: 1463 - DNA, 107 bp, Artificial Sequence
  scaffold variant
ctggcgcttttatctcattactttgagagccatcaccagcgactatgtcgtatgggtaaagcgcttatttatcggagagacaatccgataaataagaagcatcaaag

SEQ ID NO: 1464 - DNA, 107 bp, Artificial Sequence
  scaffold variant
tactggcgcttttatctcattactttgagagccatcaccagcgactatgtcgtatgggtaaagcgcttatttatcgtgagaaatccgataaataagaagcatcaaag

SEQ ID NO: 1465 - DNA, 106 bp, Artificial Sequence
  scaffold variant
actggcgcttttatctcattactttgagagccatcaccagcgactatgtcgtatgggtaaagcgcttatttatcggagagcatccgataaataagaagcatcaaag

SEQ ID NO: 1466 - DNA, 110 bp, Artificial Sequence
  scaffold variant
tactggcgcttttatcgtcattactttgagagccatcaccagcgactatgtcgtatgggtaaagcgcttatttatcggagagaaatcgcgataaataagaagcatcaaag

SEQ ID NO: 1467 - DNA, 103 bp, Artificial Sequence
  scaffold variant
ggcgcttttatctcattactttgagagccatcaccagcgactatgtcgtatgggtaaagcgcttatttatcgggagaaatccgataaataagaagcatcaaag

SEQ ID NO: 1468 - DNA, 110 bp, Artificial Sequence
  scaffold variant
tactggcgcttttatcctcattactttgagagccatcaccagcgactatgtcgtatgggtaaagcgcttatttatcggcagagaaatccgataaataagaagcatcaaag

SEQ ID NO: 1469 - DNA, 108 bp, Artificial Sequence
  scaffold variant
tactggcgcttttatctgcattactttgagagccatcaccagcgactatgtcgtatgggtaaagcgcttatttatcggagaggatccgataaataagaagcatcaaag

SEQ ID NO: 1470 - DNA, 107 bp, Artificial Sequence; identical to SEQ ID NO: 833
  scaffold variant

SEQ ID NO: 1471 - DNA, 109 bp, Artificial Sequence; identical to SEQ ID NO: 740
  scaffold variant

SEQ ID NO: 1472 - DNA, 104 bp, Artificial Sequence
  scaffold variant
ctggcgcttttatctcattactttgagagccatcaccagcgactatgtcgtatgggtaaagcgcttatttatcggagagaaccgataaataagaagcatcaaag

SEQ ID NO: 1473 - DNA, 110 bp, Artificial Sequence
  scaffold variant
ctactggcgcttttatctcattactttgagagccatcaccagcgactatgtcgtatgggtaaagcgcttatttatcggagagaaatcccgataaataagaagcatcaaag

SEQ ID NO: 1474 - DNA, 104 bp, Artificial Sequence; identical to SEQ ID NO: 609
  scaffold variant

SEQ ID NO: 1475 - DNA, 109 bp, Artificial Sequence; identical to SEQ ID NO: 518
  scaffold variant

SEQ ID NO: 1476 - DNA, 109 bp, Artificial Sequence; identical to SEQ ID NO: 980
  scaffold variant

SEQ ID NO: 1477 - DNA, 105 bp, Artificial Sequence; identical to SEQ ID NO: 698
  scaffold variant

SEQ ID NO: 1478 - DNA, 104 bp, Artificial Sequence; identical to SEQ ID NO: 946
  scaffold variant

SEQ ID NO: 1479 - DNA, 109 bp, Artificial Sequence; identical to SEQ ID NO: 740
  scaffold variant

SEQ ID NO: 1480 - DNA, 110 bp, Artificial Sequence
  scaffold variant
taactggcgcttttatctcattactttgagagccatcaccagcgactatgtcgtatgggtaaagcgcttatttatcggagagaaatcccgataaataagaagcatcaaag

SEQ ID NO: 1481 - DNA, 108 bp, Artificial Sequence
  scaffold variant
ctactggcgcttttatctcattactttgagagccatcaccagcgactatgtcgtatgggtaaagcgcttatttatctagagaaatccgataaataagaagcatcaaag

SEQ ID NO: 1482 - DNA, 108 bp, Artificial Sequence
  scaffold variant
tactggcgcttttatctcattactttgagagccatcaccagcgactatgtcgtatgggtaaagcgcttatttagcggagagaaatccgataaataagaagcatcaaag

SEQ ID NO: 1483 - DNA, 108 bp, Artificial Sequence
  scaffold variant
actggcgcttttatctcattactttgagagccatcaccagcgactatgtcgtatgggtaaagcgcttatttcatcggagagaaatccgataaataagaagcatcaaag

SEQ ID NO: 1484 - DNA, 108 bp, Artificial Sequence; identical to SEQ ID NO: 442
  scaffold variant

SEQ ID NO: 1485 - DNA, 110 bp, Artificial Sequence
  scaffold variant
tactggcgcttttatctctattactttgagagccatcaccagcgactatgtcgtatgggtaaagcgcttatttatcgagagagaaatccgataaataagaagcatcaaag

SEQ ID NO: 1486 - DNA, 106 bp, Artificial Sequence; identical to SEQ ID NO: 525
  scaffold variant

SEQ ID NO: 1487 - DNA, 109 bp, Artificial Sequence; identical to SEQ ID NO: 740
  scaffold variant

SEQ ID NO: 1488 - DNA, 108 bp, Artificial Sequence
  scaffold variant
tactggcgcttttatctcattactttgagagccatcaccagcgactatgtcgtatgggtaaagcgcttatttttcggagagaaatccgataaataagaagcatcaaag

SEQ ID NO: 1489 - DNA, 104 bp, Artificial Sequence
  scaffold variant
tggcgcttttatctcattactttgagagccatcaccagcgactatgtcgtatgggtaaagcgcttattttcggagagaaatccgataaataagaagcatcaaag

SEQ ID NO: 1490 - DNA, 110 bp, Artificial Sequence
  scaffold variant
ttactggcgcttttatctcattactttgagagccatcaccagcgactatgtcgtatgggtaaagcgcttatttatacggagagaaatccgataaataagaagcatcaaag

SEQ ID NO: 1491 - DNA, 107 bp, Artificial Sequence
  scaffold variant
cctggcgcttttatctcattactttgagagccatcaccagcgactatgtcgtatgggtaaagcgcttatttatcggagagtaatccgataaataagaagcatcaaag

SEQ ID NO: 1492 - DNA, 108 bp, Artificial Sequence
  scaffold variant
tactggcgcttttatctattactttgagagccatcaccagcgactatgtcgtatgggtaaagcgcttatttatcgcgagagaaatccgataaataagaagcatcaaag

SEQ ID NO: 1493 - DNA, 107 bp, Artificial Sequence; identical to SEQ ID NO: 972
  scaffold variant

SEQ ID NO: 1494 - DNA, 108 bp, Artificial Sequence
  scaffold variant
atactggcgcttttatctcattactttgagagccatcaccagcgactatgtcgtatgggtaaagcgcttatttattgagagaaatccgataaataagaagcatcaaag

SEQ ID NO: 1495 - DNA, 107 bp, Artificial Sequence; identical to SEQ ID NO: 990
  scaffold variant

SEQ ID NO: 1496 - DNA, 105 bp, Artificial Sequence
  scaffold variant
actggcgcttttatctcattactttgagagccatcaccagcgactatgtcgtatgggtaaagcgcttatttatcggagagaaccgataaataagaagcatcaaag

SEQ ID NO: 1497 - DNA, 108 bp, Artificial Sequence
  scaffold variant
tactggcgcttttatctcattactttgagagccatcaccagcgactatgtcgtatgggtaaagcgcttatttatacggagagaaatcgataaataagaagcatcaaag

SEQ ID NO: 1498 - DNA, 107 bp, Artificial Sequence; identical to SEQ ID NO: 915
  scaffold variant

SEQ ID NO: 1499 - DNA, 107 bp, Artificial Sequence
  scaffold variant
tctggcgcttttatctcattactttgagagccatcaccagcgactatgtcgtatgggtaaagcgcttatttatcggagagaaatccgatgaataagaagcatcaaag

SEQ ID NO: 1500 - DNA, 108 bp, Artificial Sequence
  scaffold variant
tactggcgcttttatctcgattactttgagagccatcaccagcgactatgtcgtatgggtaaagcgcttatttattgagagaaatccgataaataagaagcatcaaag

SEQ ID NO: 1501 - DNA, 108 bp, Artificial Sequence
  scaffold variant
tactggcgcttttatcctcattactttgagagccatcaccagcgactatgtcgtatgggtaaagcgcttattttcggagagaaatccgataaataagaagcatcaaag

SEQ ID NO: 1502 - DNA, 107 bp, Artificial Sequence; identical to SEQ ID NO: 1337
  scaffold variant

SEQ ID NO: 1503 - DNA, 108 bp, Artificial Sequence
  scaffold variant
tacggcgcttttatctcattactttgagagccatcaccagcgactatgtcgtatgggtaaagcgcttatttatcggagagaaatccgataaataagagagcatcaaag

SEQ ID NO: 1504 - DNA, 109 bp, Artificial Sequence; identical to SEQ ID NO: 1048
  scaffold variant

SEQ ID NO: 1505 - DNA, 108 bp, Artificial Sequence
  scaffold variant
tactggcgcttttattctcattactttgagagccatcaccagcgactatgtcgtatgggtaaagcgcttatttatcggagagaaatccctaaataagaagcatcaaag

SEQ ID NO: 1506 - DNA, 108 bp, Artificial Sequence
  scaffold variant
ctactggcgcttttatctcattactttgagagccatcaccagcgactatgtcgtatgggtaaagcgcttatttatcggagataatccgataaataagaagcatcaaag

SEQ ID NO: 1507 - DNA, 108 bp, Artificial Sequence
  scaffold variant
actggcgcttttatctcattactttgagagccatcaccagcgactatgtcgtatgggtaaagcgcttatttatcggagagaaatccgataaataagtaagcatcaaag

SEQ ID NO: 1508 - DNA, 108 bp, Artificial Sequence
  scaffold variant
taactggcgcttttatctcattactttgagagccatcaccagcgactatgtcgtatgggtaaagcgcttatttatccagagaaatccgataaataagaagcatcaaag

SEQ ID NO: 1509 - DNA, 106 bp, Artificial Sequence
  scaffold variant
tctggcgcttttatctcattactttgagagccatcaccagcgactatgtcgtatgggtaaagcgcttatttatagagagaaatccgataaataagaagcatcaaag

SEQ ID NO: 1510 - DNA, 106 bp, Artificial Sequence
  scaffold variant
gctggcgcttttatctcattactttgagagccatcaccagcgactatgtcgtatgggtaaagcggtatttatcggagagaaatccgataaataagaagcatcaaag

SEQ ID NO: 1511 - DNA, 106 bp, Artificial Sequence
  scaffold variant
gctggcgcttttatctcattactttgagagccatcaccagcgactatgtcgtatgggtaaagcgcttatttatcggagagattccgataaataagaagcatcaaag

SEQ ID NO: 1512 - DNA, 108 bp, Artificial Sequence
  scaffold variant
ctactggcgcttttatctcattactttgagagccatcaccagcgactatgtcgtatgggtaaagcgcttatttatcaagagaaatccgataaataagaagcatcaaag

SEQ ID NO: 1513 - DNA, 109 bp, Artificial Sequence; identical to SEQ ID NO: 837
  scaffold variant

SEQ ID NO: 1514 - DNA, 107 bp, Artificial Sequence; identical to SEQ ID NO: 915
  scaffold variant

SEQ ID NO: 1515 - DNA, 107 bp, Artificial Sequence; identical to SEQ ID NO: 1262
  scaffold variant

SEQ ID NO: 1516 - DNA, 106 bp, Artificial Sequence
  scaffold variant
gctggcgcttttatctcattactttgagagccatcaccagcgactatgtcgtatgggtaaagcgcttatttatcggagagaaatcgataaataagaagcatcaaag

SEQ ID NO: 1517 - DNA, 108 bp, Artificial Sequence
  scaffold variant
tctggcgcttttatctcattactttgagagccatcaccagcgactatgtcgtatgggtaaagcgcttatttatcggagagaaatccgataaataagaaagcatcaaag

SEQ ID NO: 1518 - DNA, 108 bp, Artificial Sequence
  scaffold variant
tactggcgcttttatctcattactttgagagccatcaccagcgactatgtcgtatgggtaaagcggtatttatcggagagaaatcacgataaataagaagcatcaaag

SEQ ID NO: 1519 - DNA, 110 bp, Artificial Sequence
  scaffold variant
tactggcgcttttattctcattactttgagagccatcaccagcgactatgtcgtatgggtaaagcgcttatttatcggagagaagatccgataaataagaagcatcaaag

SEQ ID NO: 1520 - DNA, 106 bp, Artificial Sequence
  scaffold variant
tggcgcttttatctcattactttgagagccatcaccagcgactatgtcgtatgggtaaagcgcttatttatcggcagagaaatccgataaataagaagcatcaaag

SEQ ID NO: 1521 - DNA, 110 bp, Artificial Sequence
  scaffold variant
tactggcgcttttatctcattactttgagagccatcaccagcgactatgtcgtatgggtaaagcgcttatttatcgggagagaaatcgcgataaataagaagcatcaaag

SEQ ID NO: 1522 - DNA, 108 bp, Artificial Sequence
  scaffold variant
tactggcgcttttatctcattactttgagagccatcaccagcgactatgtcgtatgggtaaagcgcttatttatcgagagaaatcgcgataaataagaagcatcaaag

SEQ ID NO: 1523 - DNA, 107 bp, Artificial Sequence; identical to SEQ ID NO: 1262
  scaffold variant

SEQ ID NO: 1524 - DNA, 103 bp, Artificial Sequence
  scaffold variant
ggcgcttttatctcattactttgagagccatcaccagcgactatgtcgtatgggtaaagcgcttatttatcgagagaaatccgataaataagaagcatcaaag

SEQ ID NO: 1525 - DNA, 108 bp, Artificial Sequence
  scaffold variant
tactggcgcttttaatctcattactttgagagccatcaccagcgactatgtcgtatgggtaaagcgcttatttatcgagagaaatccgataaataagaagcatcaaag

SEQ ID NO: 1526 - DNA, 109 bp, Artificial Sequence; identical to SEQ ID NO: 980
  scaffold variant

SEQ ID NO: 1527 - DNA, 108 bp, Artificial Sequence
  scaffold variant
actggcgcttttatctcattactttgagagccatcaccagcgactatgtcgtatgggtaaagcgcttatttatcggagagaaagtccgataaataagaagcatcaaag

SEQ ID NO: 1528 - DNA, 107 bp, Artificial Sequence; identical to SEQ ID NO: 1036
  scaffold variant

SEQ ID NO: 1529 - DNA, 107 bp, Artificial Sequence; identical to SEQ ID NO: 972
  scaffold variant

SEQ ID NO: 1530 - DNA, 109 bp, Artificial Sequence; identical to SEQ ID NO: 740
  scaffold variant

SEQ ID NO: 1531 - DNA, 110 bp, Artificial Sequence
  scaffold variant
tactggcgcttttaatctcattactttgagagccatcaccagcgactatgtcgtatgggtaaagcgcttatttatacggagagaaatccgataaataagaagcatcaaag

SEQ ID NO: 1532 - DNA, 108 bp, Artificial Sequence
  scaffold variant
tacctggcgcttttatctcattactttgagagccatcaccagcgactatgtcgtatgggtaaagcgcttatttatcaagagaaatccgataaataagaagcatcaaag

SEQ ID NO: 1533 - DNA, 106 bp, Artificial Sequence; identical to SEQ ID NO: 371
  scaffold variant

SEQ ID NO: 1534 - DNA, 110 bp, Artificial Sequence
  scaffold variant
tactggcgcttttaatctcattactttgagagccatcaccagcgactatgtcgtatgggtaaagcgcttatttatcggagagaaatcacgataaataagaagcatcaaag

SEQ ID NO: 1535 - DNA, 107 bp, Artificial Sequence; identical to SEQ ID NO: 563
  scaffold variant

SEQ ID NO: 1536 - DNA, 108 bp, Artificial Sequence
  scaffold variant
tactggcgcttttatctctattactttgagagccatcaccagcgactatgtcgtatgggtaaagcgcttatttattgagagaaatccgataaataagaagcatcaaag

SEQ ID NO: 1537 - DNA, 106 bp, Artificial Sequence; identical to SEQ ID NO: 988
  scaffold variant

SEQ ID NO: 1538 - DNA, 107 bp, Artificial Sequence; identical to SEQ ID NO: 1039
  scaffold variant

SEQ ID NO: 1539 - DNA, 105 bp, Artificial Sequence; identical to SEQ ID NO: 959
  scaffold variant

SEQ ID NO: 1540 - DNA, 107 bp, Artificial Sequence; identical to SEQ ID NO: 1091
  scaffold variant

SEQ ID NO: 1541 - DNA, 106 bp, Artificial Sequence; identical to SEQ ID NO: 633
  scaffold variant

SEQ ID NO: 1542 - DNA, 108 bp, Artificial Sequence
  scaffold variant
gctggcgcttttatctcattactttgagagccatcaccagcgactatgtcgtatgggtaaagcgcttatttatcggagagaaataccgataaataagaagcatcaaag

SEQ ID NO: 1543 - DNA, 108 bp, Artificial Sequence
  scaffold variant
tactggcgcttttatctgcattactttgagagccatcaccagcgactatgtcgtatgggtaaagcgcttatttatcggaagaaatccgataaataagaagcatcaaag

SEQ ID NO: 1544 - DNA, 108 bp, Artificial Sequence
  scaffold variant
tacggcgcttttatctcattactttgagagccatcaccagcgactatgtcgtatgggtaaagcgcttatttatcggagagagaatccgataaataagaagcatcaaag

SEQ ID NO: 1545 - DNA, 108 bp, Artificial Sequence
  scaffold variant
tactggcgcttttatctcattactttgagagccatcaccagcgactatgtcgtatgggtaaagcggtatttatcggagagaaatctcgataaataagaagcatcaaag

SEQ ID NO: 1546 - DNA, 107 bp, Artificial Sequence; identical to SEQ ID NO: 1262
  scaffold variant

SEQ ID NO: 1547 - DNA, 110 bp, Artificial Sequence
  scaffold variant
tactggcgcttttattctcattactttgagagccatcaccagcgactatgtcgtatgggtaaagcgcttattttatcggagagaaatccgataaataagaagcatcaaag

SEQ ID NO: 1548 - DNA, 105 bp, Artificial Sequence
  scaffold variant
tctggcgcttttatctcattactttgagagccatcaccagcgactatgtcgtatgggtaaagcgcttatttatcggagatatccgataaataagaagcatcaaag

SEQ ID NO: 1549 - DNA, 108 bp, Artificial Sequence
  scaffold variant
gctggcgcttttatctctattactttgagagccatcaccagcgactatgtcgtatgggtaaagcgcttatttatcggagagaaatccgataaataagaagcatcaaag

SEQ ID NO: 1550 - DNA, 109 bp, Artificial Sequence; identical to SEQ ID NO: 1183
  scaffold variant

SEQ ID NO: 1551 - DNA, 108 bp, Artificial Sequence
  scaffold variant
tactggcgcttttatctcattactttgagagccatcaccagcgactatgtcgtatgggtaaagcgcttatttctcggagagaaatccgataaataagaagcatcaaag

SEQ ID NO: 1552 - DNA, 110 bp, Artificial Sequence
  scaffold variant
ttactggcgcttttatctcattactttgagagccatcaccagcgactatgtcgtatgggtaaagcgcttatttatcggagagaaataccgataaataagaagcatcaaag

SEQ ID NO: 1553 - DNA, 105 bp, Artificial Sequence
  scaffold variant
tctggcgcttttatctcattactttgagagccatcaccagcgactatgtcgtatgggtaaagcgcttatttatcggagagaaacgataaataagaagcatcaaag

SEQ ID NO: 1554 - DNA, 107 bp, Artificial Sequence
  scaffold variant
tctggcgcttttatctcattactttgagagccatcaccagcgactatgtcgtatgggtaaagcgcttatttatcggagagaaatctgataaataagaagcatcaaag

SEQ ID NO: 1555 - DNA, 109 bp, Artificial Sequence
  scaffold variant
tactggcgcttttatctcattactttgagagccatcaccagcgactatgtcgtatgggtaaagcgcttatttagtcggagagaaatccgataaataagaagcatcaaag

SEQ ID NO: 1556 - DNA, 106 bp, Artificial Sequence
  scaffold variant
gctggcgcttttatctcattactttgagagccatcaccagcgactatgtcgtatgggtaaagcgcttatttatcggagacaatccgataaataagaagcatcaaag

SEQ ID NO: 1557 - DNA, 106 bp, Artificial Sequence
  scaffold variant
actggcgcttttatctcattactttgagagccatcaccagcgactatgtcgtatgggtaaagcgcttatttatcggagagaaatccgatagtaagaagcatcaaag

SEQ ID NO: 1558 - DNA, 108 bp, Artificial Sequence
  scaffold variant
cctggcgcttttatctcattactttgagagccatcaccagcgactatgtcgtatgggtaaagcgcttatttatcggagaagaaatccgataaataagaagcatcaaag

SEQ ID NO: 1559 - DNA, 107 bp, Artificial Sequence; identical to SEQ ID NO: 925
  scaffold variant

SEQ ID NO: 1560 - DNA, 108 bp, Artificial Sequence
  scaffold variant
tactggcgcttttatctctattactttgagagccatcaccagcgactatgtcgtatgggtaaagcgcttatttatcggcagaaatccgataaataagaagcatcaaag

SEQ ID NO: 1561 - DNA, 108 bp, Artificial Sequence
  scaffold variant
tactggcgcttttatcctcattactttgagagccatcaccagcgactatgtcgtatgggtaaagcgcttatttatcggcagaaatccgataaataagaagcatcaaag

SEQ ID NO: 1562 - DNA, 107 bp, Artificial Sequence
  scaffold variant
ctggcgcttttatctcattactttgagagccatcaccagcgactatgtcgtatgggtaaagcgcttatttatcgcgagagaaatccgataaataagaagcatcaaag

SEQ ID NO: 1563 - DNA, 110 bp, Artificial Sequence
  scaffold variant
tactggcgcttttatcctcattactttgagagccatcaccagcgactatgtcgtatgggtaaagcgcttatttatcggagagaaatccgaataaataagaagcatcaaag

SEQ ID NO: 1564 - DNA, 109 bp, Artificial Sequence; identical to SEQ ID NO: 802
  scaffold variant

SEQ ID NO: 1565 - DNA, 107 bp, Artificial Sequence
  scaffold variant
gatggcgcttttatctcattactttgagagccatcaccagcgactatgtcgtatgggtaaagcgcttatttatcggagagaaatccgataaataagaagcatcaaag

SEQ ID NO: 1566 - DNA, 108 bp, Artificial Sequence
  scaffold variant
tactggcgcttttatctgcattactttgagagccatcaccagcgactatgtcgtatgggtaaagcggtatttatcggagagaaatccgataaataagaagcatcaaag

SEQ ID NO: 1567 - DNA, 108 bp, Artificial Sequence
  scaffold variant
tactggcgcttttatctcattactttgagagccatcaccagcgactatgtcgtatgggtaaagcggtatttatcggagagaaatcccgataaataagaagcatcaaag

SEQ ID NO: 1568 - DNA, 107 bp, Artificial Sequence; identical to SEQ ID NO: 833
  scaffold variant

SEQ ID NO: 1569 - DNA, 106 bp, Artificial Sequence
  scaffold variant
actggcgcttttatctcattactttgagagccatcaccagcgactatgtcgtatgggtaaagcgcttatttatcggagagaaagcgataaataagaagcatcaaag

SEQ ID NO: 1570 - DNA, 109 bp, Artificial Sequence
  scaffold variant
tactggcgcttttattctcattactttgagagccatcaccagcgactatgtcgtatgggtaaagcgcttatttatcggtgagaaatccgataaataagaagcatcaaag

SEQ ID NO: 1571 - DNA, 107 bp, Artificial Sequence; identical to SEQ ID NO: 1091
  scaffold variant

SEQ ID NO: 1572 - DNA, 108 bp, Artificial Sequence
  scaffold variant
tactggcgcttttattctcattactttgagagccatcaccagcgactatgtcgtatgggtaaagcgcttatttatcggcagaaatccgataaataagaagcatcaaag

SEQ ID NO: 1573 - DNA, 105 bp, Artificial Sequence
  scaffold variant
gctggcgcttttatctcattactttgagagccatcaccagcgactatgtcgtatgggtaaagcgcttatttatcggagatatccgataaataagaagcatcaaag

SEQ ID NO: 1574 - DNA, 106 bp, Artificial Sequence
  scaffold variant
actggcgcttttatctcattactttgagagccatcaccagcgactatgtcgtatgggtaaagcgcttatttatcggagagaaatccgatgataagaagcatcaaag

SEQ ID NO: 1575 - DNA, 105 bp, Artificial Sequence
  scaffold variant
ctggcgcttttatctcattactttgagagccatcaccagcgactatgtcgtatgggtaaagctttatttatcggagagaaatccgataaataagaagcatcaaag

SEQ ID NO: 1576 - DNA, 105 bp, Artificial Sequence
  scaffold variant
cctggcgcttttatctcattactttgagagccatcaccagcgactatgtcgtatgggtaaagcgcttatttatctgagaaatccgataaataagaagcatcaaag

SEQ ID NO: 1577 - DNA, 108 bp, Artificial Sequence; identical to SEQ ID NO: 374
  scaffold variant

SEQ ID NO: 1578 - DNA, 109 bp, Artificial Sequence; identical to SEQ ID NO: 980
  scaffold variant

SEQ ID NO: 1579 - DNA, 108 bp, Artificial Sequence
  scaffold variant
tactggcgcttttatctcattactttgagagccatcaccagcgactatgtcgtatgggtaaagcgcttatttacggagagaaatcgcgataaataagaagcatcaaag

SEQ ID NO: 1580 - DNA, 106 bp, Artificial Sequence
  scaffold variant
tacggcgcttttatctcattactttgagagccatcaccagcgactatgtcgtatgggtaaagcgatatttatcggagagaaatccgataaataagaagcatcaaag

SEQ ID NO: 1581 - DNA, 107 bp, Artificial Sequence; identical to SEQ ID NO: 1262
  scaffold variant

SEQ ID NO: 1582 - DNA, 110 bp, Artificial Sequence
  scaffold variant
tactggcgcttttatcctcattactttgagagccatcaccagcgactatgtcgtatgggtaaagcgcttatttatcggagagaaatccggataaataagaagcatcaaag

SEQ ID NO: 1583 - DNA, 107 bp, Artificial Sequence
  scaffold variant
ttactggcgcttttatctcattactttgagagccatcaccagcgactatgtcgtatgggtaaagcgcttatttatcggagaaatccgataaataagaagcatcaaag

SEQ ID NO: 1584 - DNA, 109 bp, Artificial Sequence; identical to SEQ ID NO: 980
  scaffold variant

SEQ ID NO: 1585 - DNA, 109 bp, Artificial Sequence; identical to SEQ ID NO: 912
  scaffold variant

SEQ ID NO: 1586 - DNA, 107 bp, Artificial Sequence
  scaffold variant
actggcgcttttatctcattactttgagagccatcaccagcgactatgtcgtatgggtaaagcgcttatttttcggagagaaatccgataaataagaagcatcaaag

SEQ ID NO: 1587 - DNA, 107 bp, Artificial Sequence; identical to SEQ ID NO: 972
  scaffold variant

SEQ ID NO: 1588 - DNA, 110 bp, Artificial Sequence
  scaffold variant
tactggcgcttttatcttcattactttgagagccatcaccagcgactatgtcgtatgggtaaagcgcttatttatcggagagaaatccgaataaataagaagcatcaaag

SEQ ID NO: 1589 - DNA, 110 bp, Artificial Sequence
  scaffold variant
tactggcgcttttattctcattactttgagagccatcaccagcgactatgtcgtatgggtaaagcgcttatttatcggagagaaatccgataaataagagagcatcaaag

SEQ ID NO: 1590 - DNA, 107 bp, Artificial Sequence
  scaffold variant
tactggcgcttttatctcattactttgagagccatcaccagcgactatgtcgtatgggtaaagcgcttatttgaggagagaaatccgataaataagaagcatcaaag

SEQ ID NO: 1591 - DNA, 106 bp, Artificial Sequence; identical to SEQ ID NO: 1001
  scaffold variant

SEQ ID NO: 1592 - DNA, 107 bp, Artificial Sequence; identical to SEQ ID NO: 833
  scaffold variant

SEQ ID NO: 1593 - DNA, 108 bp, Artificial Sequence
  scaffold variant
ttactggcgcttttatctcattactttgagagccatcaccagcgactatgtcgtatgggtaaagcgcttatttatcggagagaaatccataaataagaagcatcaaag

SEQ ID NO: 1594 - DNA, 108 bp, Artificial Sequence
  scaffold variant
tactggcgcttttatcttcattactttgagagccatcaccagcgactatgtcgtatgggtaaagcgcttatttatcggagagaaatccctaaataagaagcatcaaag

SEQ ID NO: 1595 - DNA, 105 bp, Artificial Sequence
  scaffold variant
ctggcgcttttatctcattactttgagagccatcaccagcgactatgtcgtatgggtaaagcattatttatcggagagaaatccgataaataagaagcatcaaag

SEQ ID NO: 1596 - DNA, 109 bp, Artificial Sequence; identical to SEQ ID NO: 518
  scaffold variant

SEQ ID NO: 1597 - DNA, 108 bp, Artificial Sequence
  scaffold variant
tactggcgcttttatctattactttgagagccatcaccagcgactatgtcgtatgggtaaagcgcttatttatcgggagagaaatccgataaataagaagcatcaaag

SEQ ID NO: 1598 - DNA, 109 bp, Artificial Sequence; identical to SEQ ID NO: 802
  scaffold variant

SEQ ID NO: 1599 - DNA, 106 bp, Artificial Sequence
  scaffold variant
gctggcgcttttatctcattactttgagagccatcaccagcgactatgtcgtatgggtaaagcgcttatttatcggaagaaatccgataaataagaagcatcaaag

SEQ ID NO: 1600 - DNA, 108 bp, Artificial Sequence
  scaffold variant
tactggcgcttttattctcattactttgagagccatcaccagcgactatgtcgtatgggtaaagcgcttatttatcggagagtatccgataaataagaagcatcaaag

SEQ ID NO: 1601 - DNA, 106 bp, Artificial Sequence
  scaffold variant
ctggcgcttttatctcattactttgagagccatcaccagcgactatgtcgtatgggtaaagcgcttatttatcggcgagaaatccgataaataagaagcatcaaag

SEQ ID NO: 1602 - DNA, 106 bp, Artificial Sequence
  scaffold variant
gatggcgcttttatctcattactttgagagccatcaccagcgactatgtcgtatgggtaaagcgcttatttatcgagagaaatccgataaataagaagcatcaaag

SEQ ID NO: 1603 - DNA, 106 bp, Artificial Sequence; identical to SEQ ID NO: 737
  scaffold variant

SEQ ID NO: 1604 - DNA, 109 bp, Artificial Sequence; identical to SEQ ID NO: 1017
  scaffold variant

SEQ ID NO: 1605 - DNA, 107 bp, Artificial Sequence; identical to SEQ ID NO: 833
  scaffold variant

SEQ ID NO: 1606 - DNA, 106 bp, Artificial Sequence
  scaffold variant
tactggcgcttttatctcattactttgagagccatcaccagcgactatgtcgtatgggtaaagcggtatttatcggagagaaatcgataaataagaagcatcaaag

SEQ ID NO: 1607 - DNA, 109 bp, Artificial Sequence; identical to SEQ ID NO: 980
  scaffold variant

SEQ ID NO: 1608 - DNA, 108 bp, Artificial Sequence
  scaffold variant
tacggcgcttttatctcattactttgagagccatcaccagcgactatgtcgtatgggtaaagcgcttatttgatcggagagaaatccgataaataagaagcatcaaag

SEQ ID NO: 1609 - DNA, 110 bp, Artificial Sequence
  scaffold variant
tactggcgcttttatcctcattactttgagagccatcaccagcgactatgtcgtatgggtaaagcgcttatttatcggagagacaatccgataaataagaagcatcaaag

SEQ ID NO: 1610 - DNA, 103 bp, Artificial Sequence
  scaffold variant
tggcgcttttatctcattactttgagagccatcaccagcgactatgtcgtatgggtaaagcgcttatttatcggagaaatccgataaataagaagcatcaaag

SEQ ID NO: 1611 - DNA, 109 bp, Artificial Sequence; identical to SEQ ID NO: 1010
  scaffold variant

SEQ ID NO: 1612 - DNA, 109 bp, Artificial Sequence; identical to SEQ ID NO: 980
  scaffold variant

SEQ ID NO: 1613 - DNA, 105 bp, Artificial Sequence; identical to SEQ ID NO: 998
  scaffold variant

SEQ ID NO: 1614 - DNA, 108 bp, Artificial Sequence
  scaffold variant
tacggcgcttttatcctcattactttgagagccatcaccagcgactatgtcgtatgggtaaagcgcttatttatcggagagaaatccgataaataagaagcatcaaag

SEQ ID NO: 1615 - DNA, 109 bp, Artificial Sequence; identical to SEQ ID NO: 802
  scaffold variant

SEQ ID NO: 1616 - DNA, 108 bp, Artificial Sequence
  scaffold variant
tactggcgcttttatctcattactttgagagccatcaccagcgactatgtcgtatgggtaaagcgcttatttacggagagaaatccgataaataagtaagcatcaaag

SEQ ID NO: 1617 - DNA, 104 bp, Artificial Sequence
  scaffold variant
tggcgcttttatctcattactttgagagccatcaccagcgactatgtcgtatgggtaaagcgcttatttattgagagaaatccgataaataagaagcatcaaag

SEQ ID NO: 1618 - DNA, 107 bp, Artificial Sequence
  scaffold variant
tactggcgcttttatctcattactttgagagccatcaccagcgactatgtcgtatgggtaaagcgcttatttatcggagagaaatccggaaataagaagcatcaaag

SEQ ID NO: 1619 - DNA, 110 bp, Artificial Sequence
  scaffold variant
tactggcgcttttatctctattactttgagagccatcaccagcgactatgtcgtatgggtaaagcgcttatttatctggagagaaatccgataaataagaagcatcaaag

SEQ ID NO: 1620 - DNA, 107 bp, Artificial Sequence
  scaffold variant
tctggcgcttttatctcattactttgagagccatcaccagcgactatgtcgtatgggtaaagcgcttatttatcggagagaaatccgctaaataagaagcatcaaag

SEQ ID NO: 1621 - DNA, 107 bp, Artificial Sequence; identical to SEQ ID NO: 972
  scaffold variant

SEQ ID NO: 1622 - DNA, 109 bp, Artificial Sequence
  scaffold variant
tactggcgcttttatctgcattactttgagagccatcaccagcgactatgtcgtatgggtaaagcgcttatttatcggcgagaaatccgataaataagaagcatcaaag

SEQ ID NO: 1623 - DNA, 108 bp, Artificial Sequence
  scaffold variant
tactggcgcttttatctcattactttgagagccatcaccagcgactatgtcgtatgggtaaagcgcttatttatggagagaaatcgcgataaataagaagcatcaaag

SEQ ID NO: 1624 - DNA, 110 bp, Artificial Sequence
  scaffold variant
tacctggcgcttttatctcattactttgagagccatcaccagcgactatgtcgtatgggtaaagcgcttatttattcggagagaaatccgataaataagaagcatcaaag

SEQ ID NO: 1625 - DNA, 109 bp, Artificial Sequence; identical to SEQ ID NO: 1183
  scaffold variant

SEQ ID NO: 1626 - DNA, 107 bp, Artificial Sequence; identical to SEQ ID NO: 1036
  scaffold variant

SEQ ID NO: 1627 - DNA, 105 bp, Artificial Sequence; identical to SEQ ID NO: 524
  scaffold variant

SEQ ID NO: 1628 - DNA, 110 bp, Artificial Sequence
  scaffold variant
tactggcgcttttatctcattactttgagagccatcaccagcgactatgtcgtatgggtaaagcgcttattttatcggagagaaatcgcgataaataagaagcatcaaag

SEQ ID NO: 1629 - DNA, 108 bp, Artificial Sequence
  scaffold variant
tactggcgcttttatctcattactttgagagccatcaccagcgactatgtcgtatgggtaaagcgcttattttcggagagaaatcccgataaataagaagcatcaaag

SEQ ID NO: 1630 - DNA, 108 bp, Artificial Sequence
  scaffold variant
tactggcgcttttatctcattactttgagagccatcaccagcgactatgtcgtatgggtaaagcgcttatttatcggcgagaaatccgataaataagaagcatcaaag

SEQ ID NO: 1631 - DNA, 108 bp, Artificial Sequence
  scaffold variant
tctggcgcttttatctcattactttgagagccatcaccagcgactatgtcgtatgggtaaagcgcttatttatcggagagacaatccgataaataagaagcatcaaag

SEQ ID NO: 1632 - DNA, 107 bp, Artificial Sequence; identical to SEQ ID NO: 833
  scaffold variant

SEQ ID NO: 1633 - DNA, 109 bp, Artificial Sequence; identical to SEQ ID NO: 1048
  scaffold variant

SEQ ID NO: 1634 - DNA, 107 bp, Artificial Sequence
  scaffold variant
ctggcgcttttatctcattactttgagagccatcaccagcgactatgtcgtatgggtaaagcgcttattctatcggagagaaatccgataaataagaagcatcaaag

SEQ ID NO: 1635 - DNA, 109 bp, Artificial Sequence; identical to SEQ ID NO: 1183
  scaffold variant

SEQ ID NO: 1636 - DNA, 107 bp, Artificial Sequence
  scaffold variant
cctggcgcttttatctcattactttgagagccatcaccagcgactatgtcgtatgggtaaagcgcttatttatcggagagaagtccgataaataagaagcatcaaag

SEQ ID NO: 1637 - DNA, 108 bp, Artificial Sequence
  scaffold variant
ttactggcgcttttatctcattactttgagagccatcaccagcgactatgtcgtatgggtaaagcgcttatttatcggtagaaatccgataaataagaagcatcaaag

SEQ ID NO: 1638 - DNA, 110 bp, Artificial Sequence
  scaffold variant
tactggcgcttttatctcattactttgagagccatcaccagcgactatgtcgtatgggtaaagcgcttatttatgcggagagaaatgccgataaataagaagcatcaaag

SEQ ID NO: 1639 - DNA, 109 bp, Artificial Sequence; identical to SEQ ID NO: 1183
  scaffold variant

SEQ ID NO: 1640 - DNA, 105 bp, Artificial Sequence
  scaffold variant
ctggcgcttttatctcattactttgagagccatcaccagcgactatgtcgtatgggtaaagcgcttatttatcggagacaatccgataaataagaagcatcaaag

SEQ ID NO: 1641 - DNA, 107 bp, Artificial Sequence; identical to SEQ ID NO: 1262
  scaffold variant

SEQ ID NO: 1642 - DNA, 107 bp, Artificial Sequence; identical to SEQ ID NO: 1091
  scaffold variant

SEQ ID NO: 1643 - DNA, 107 bp, Artificial Sequence; identical to SEQ ID NO: 1262
  scaffold variant

SEQ ID NO: 1644 - DNA, 110 bp, Artificial Sequence
  scaffold variant
tactggcgcttttatctgcattactttgagagccatcaccagcgactatgtcgtatgggtaaagcgcttatttatcggagagaaatcctgataaataagaagcatcaaag

SEQ ID NO: 1645 - DNA, 109 bp, Artificial Sequence; identical to SEQ ID NO: 980
  scaffold variant

SEQ ID NO: 1646 - DNA, 108 bp, Artificial Sequence
  scaffold variant
gctggcgcttttatctcattactttgagagccatcaccagcgactatgtcgtatgggtaaagcgcttattctatcggagagaaatccgataaataagaagcatcaaag

SEQ ID NO: 1647 - DNA, 110 bp, Artificial Sequence
  scaffold variant
tactggcgcttttatctcattactttgagagccatcaccagcgactatgtcgtagtgggtaaagcgcttatttatccggagagaaatccgataaataagaagcatcaaag

SEQ ID NO: 1648 - DNA, 109 bp, Artificial Sequence; identical to SEQ ID NO: 941
  scaffold variant

SEQ ID NO: 1649 - DNA, 109 bp, Artificial Sequence; identical to SEQ ID NO: 1048
  scaffold variant

SEQ ID NO: 1650 - DNA, 103 bp, Artificial Sequence; identical to SEQ ID NO: 1524
  scaffold variant

SEQ ID NO: 1651 - DNA, 109 bp, Artificial Sequence; identical to SEQ ID NO: 802
  scaffold variant

SEQ ID NO: 1652 - DNA, 106 bp, Artificial Sequence; identical to SEQ ID NO: 385
  scaffold variant

SEQ ID NO: 1653 - DNA, 104 bp, Artificial Sequence
  scaffold variant
cctggcgcttttatctcattactttgagagccatcaccagcgactatgtcgtatgggtaaagcgcttatttatcggagagaaagataaataagaagcatcaaag

SEQ ID NO: 1654 - DNA, 110 bp, Artificial Sequence
  scaffold variant
tcactggcgcttttatctcattactttgagagccatcaccagcgactatgtcgtatgggtaaagcgcttatttatcggagagaaatcacgataaataagaagcatcaaag

SEQ ID NO: 1655 - DNA, 110 bp, Artificial Sequence
  scaffold variant
ttactggcgcttttatctcattactttgagagccatcaccagcgactatgtcgtatgggtaaagcgcttatttatcgtgagagaaatccgataaataagaagcatcaaag

SEQ ID NO: 1656 - DNA, 107 bp, Artificial Sequence; identical to SEQ ID NO: 1218
  scaffold variant

SEQ ID NO: 1657 - DNA, 109 bp, Artificial Sequence; identical to SEQ ID NO: 1048
  scaffold variant

SEQ ID NO: 1658 - DNA, 107 bp, Artificial Sequence
  scaffold variant
ctggcgcttttatctcattactttgagagccatcaccagcgactatgtcgtatgggtaaagcgcttattatatcggagagaaatccgataaataagaagcatcaaag

SEQ ID NO: 1659 - DNA, 110 bp, Artificial Sequence
  scaffold variant
tactggcgcttttatcgtcattactttgagagccatcaccagcgactatgtcgtatgggtaaagcgcttatttatcggagagaaatctcgataaataagaagcatcaaag

SEQ ID NO: 1660 - DNA, 106 bp, Artificial Sequence; identical to SEQ ID NO: 771
  scaffold variant

SEQ ID NO: 1661 - DNA, 106 bp, Artificial Sequence
  scaffold variant
gctggcgcttttatctcattactttgagagccatcaccagcgactatgtcgtatgggtaaagcgcttatttatcggagagaatccgataaataagaagcatcaaag

SEQ ID NO: 1662 - DNA, 106 bp, Artificial Sequence
  scaffold variant
actggcgcttttatctcattactttgagagccatcaccagcgactatgtcgtatgggtaaagcgcttatttatcggagagaaatagataaataagaagcatcaaag

SEQ ID NO: 1663 - DNA, 108 bp, Artificial Sequence
  scaffold variant
tactggcgcttttatctctattactttgagagccatcaccagcgactatgtcgtatgggtaaagcgcttatttgcggagagaaatccgataaataagaagcatcaaag

SEQ ID NO: 1664 - DNA, 107 bp, Artificial Sequence; identical to SEQ ID NO: 833
  scaffold variant

SEQ ID NO: 1665 - DNA, 109 bp, Artificial Sequence; identical to SEQ ID NO: 1048
  scaffold variant

SEQ ID NO: 1666 - DNA, 108 bp, Artificial Sequence
  scaffold variant
ttactggcgcttttatctcattactttgagagccatcaccagcgactatgtcgtatgggtaaagcgcttatttacggagagaaatccgataaataagaagcatcaaag

SEQ ID NO: 1667 - DNA, 108 bp, Artificial Sequence
  scaffold variant
gctggcgcttttatctcattactttgagagccatcaccagcgactatgtcgtatgggtaaagcgcttatttatcggagagaaatccgcataaataagaagcatcaaag

SEQ ID NO: 1668 - DNA, 108 bp, Artificial Sequence
  scaffold variant
tactggcgcttttatctcgattactttgagagccatcaccagcgactatgtcgtatgggtaaagcgcttatttatccagagaaatccgataaataagaagcatcaaag

SEQ ID NO: 1669 - DNA, 107 bp, Artificial Sequence; identical to SEQ ID NO: 833
  scaffold variant

SEQ ID NO: 1670 - DNA, 109 bp, Artificial Sequence; identical to SEQ ID NO: 912
  scaffold variant

SEQ ID NO: 1671 - DNA, 106 bp, Artificial Sequence
  scaffold variant
actggcgcttttatctcattactttgagagccatcaccagcgactatgtcgtatgggtaaagcgcttatttgcggagagaaatccgataaataagaagcatcaaag

SEQ ID NO: 1672 - DNA, 103 bp, Artificial Sequence; identical to SEQ ID NO: 1467
  scaffold variant

SEQ ID NO: 1673 - DNA, 107 bp, Artificial Sequence; identical to SEQ ID NO: 1262
  scaffold variant

SEQ ID NO: 1674 - DNA, 109 bp, Artificial Sequence; identical to SEQ ID NO: 740
  scaffold variant

SEQ ID NO: 1675 - DNA, 107 bp, Artificial Sequence
  scaffold variant
cctggcgcttttatctcattactttgagagccatcaccagcgactatgtcgtatgggtaaagcgcttatttagcggagagaaatccgataaataagaagcatcaaag

SEQ ID NO: 1676 - DNA, 105 bp, Artificial Sequence
  scaffold variant
ctggcgcttttatctcattactttgagagccatcaccagcgactatgtcgtatgggtaaagcgcttatttatcggatgaaatccgataaataagaagcatcaaag

SEQ ID NO: 1677 - DNA, 109 bp, Artificial Sequence; identical to SEQ ID NO: 518
  scaffold variant

SEQ ID NO: 1678 - DNA, 107 bp, Artificial Sequence
  scaffold variant
actggcgcttttatctcattactttgagagccatcaccagcgactatgtcgtatgggtaaagcgcttatttatcggagagaaatccgataaataagaagcatcaaag

SEQ ID NO: 1679 - DNA, 107 bp, Artificial Sequence; identical to SEQ ID NO: 507
  scaffold variant

SEQ ID NO: 1680 - DNA, 107 bp, Artificial Sequence; identical to SEQ ID NO: 1091
  scaffold variant

SEQ ID NO: 1681 - DNA, 110 bp, Artificial Sequence
  scaffold variant
tactggcgcttttatcctcattactttgagagccatcaccagcgactatgtcgtatgggtaaagcgcttattctatcggagagaaatccgataaataagaagcatcaaag

SEQ ID NO: 1682 - DNA, 107 bp, Artificial Sequence; identical to SEQ ID NO: 1036
  scaffold variant

SEQ ID NO: 1683 - DNA, 105 bp, Artificial Sequence; identical to SEQ ID NO: 789
  scaffold variant

SEQ ID NO: 1684 - DNA, 109 bp, Artificial Sequence; identical to SEQ ID NO: 1119
  scaffold variant

SEQ ID NO: 1685 - DNA, 108 bp, Artificial Sequence; identical to SEQ ID NO: 405
  scaffold variant

SEQ ID NO: 1686 - DNA, 109 bp, Artificial Sequence; identical to SEQ ID NO: 1048
  scaffold variant

SEQ ID NO: 1687 - DNA, 107 bp, Artificial Sequence; identical to SEQ ID NO: 386
  scaffold variant

SEQ ID NO: 1688 - DNA, 108 bp, Artificial Sequence
  scaffold variant
gctggcgcttttatctcattactttgagagccatcaccagcgactatgtcgtatgggtaaagcgcttatttatcgagagagaaatccgataaataagaagcatcaaag

SEQ ID NO: 1689 - DNA, 109 bp, Artificial Sequence; identical to SEQ ID NO: 912
  scaffold variant

SEQ ID NO: 1690 - DNA, 107 bp, Artificial Sequence; identical to SEQ ID NO: 833
  scaffold variant

SEQ ID NO: 1691 - DNA, 107 bp, Artificial Sequence
  scaffold variant
tactggcgcttttatctcattactttgagagccatcaccagcgactatgtcgtatgggtaaagcgcttattttcggagagaaatccgataaataagaagcatcaaag

SEQ ID NO: 1692 - DNA, 110 bp, Artificial Sequence
  scaffold variant
tactggcgcttttatctctattactttgagagccatcaccagcgactatgtcgtatgggtaaagcgcttatttatcggagagaaatccgcataaataagaagcatcaaag

SEQ ID NO: 1693 - DNA, 106 bp, Artificial Sequence
  scaffold variant
tggcgcttttatctcattactttgagagccatcaccagcgactatgtcgtatgggtaaagcgcttatttatacggagagaaatccgataaataagaagcatcaaag

SEQ ID NO: 1694 - DNA, 107 bp, Artificial Sequence
  scaffold variant
tactggcgcttttatcctcattactttgagagccatcaccagcgactatgtcgtatgggtaaagcgcttatttatcggagaaatccgataaataagaagcatcaaag

SEQ ID NO: 1695 - DNA, 110 bp, Artificial Sequence
  scaffold variant
ttactggcgcttttatctcattactttgagagccatcaccagcgactatgtcgtatgggtaaagcgcttatttatcggagagaaatctcgataaataagaagcatcaaag

SEQ ID NO: 1696 - DNA, 109 bp, Artificial Sequence; identical to SEQ ID NO: 518
  scaffold variant

SEQ ID NO: 1697 - DNA, 106 bp, Artificial Sequence
  scaffold variant
tctggcgcttttatctcattactttgagagccatcaccagcgactatgtcgtatgggtaaagcgcttatttatcggatgaaatccgataaataagaagcatcaaag

SEQ ID NO: 1698 - DNA, 106 bp, Artificial Sequence; identical to SEQ ID NO: 403
  scaffold variant

SEQ ID NO: 1699 - DNA, 105 bp, Artificial Sequence; identical to SEQ ID NO: 478
  scaffold variant

SEQ ID NO: 1700 - DNA, 104 bp, Artificial Sequence
  scaffold variant
tggcgcttttatctcattactttgagagccatcaccagcgactatgtcgtatgggtaaagcgcttatttatcggaggaaatccgataaataagaagcatcaaag

SEQ ID NO: 1701 - DNA, 107 bp, Artificial Sequence
  scaffold variant
cctggcgcttttatctcattactttgagagccatcaccagcgactatgtcgtatgggtaaagcgcttatttatcggagagaaatacgataaataagaagcatcaaag

SEQ ID NO: 1702 - DNA, 108 bp, Artificial Sequence
  scaffold variant
tactggcgcttttatactcattactttgagagccatcaccagcgactatgtcgtatgggtaaagcgcttatttatccagagaaatccgataaataagaagcatcaaag

SEQ ID NO: 1703 - DNA, 107 bp, Artificial Sequence
  scaffold variant
tctggcgcttttatctcattactttgagagccatcaccagcgactatgtcgtatgggtaaagcgcttatttttcggagagaaatccgataaataagaagcatcaaag

SEQ ID NO: 1704 - DNA, 107 bp, Artificial Sequence
  scaffold variant
tactggcgcttttatctcattactttgagagccatcaccagcgactatgtcgtatgggtaaagcgcttatttatcgtcagaaatccgataaataagaagcatcaaag

SEQ ID NO: 1705 - DNA, 106 bp, Artificial Sequence
  scaffold variant
tactggcgcttttattcattactttgagagccatcaccagcgactatgtcgtatgggtaaagcgcttatttatctagagaaatccgataaataagaagcatcaaag

SEQ ID NO: 1706 - DNA, 108 bp, Artificial Sequence
  scaffold variant
tactggcgcttttatctcattactttgagagccatcaccagcgactatgtcgtatgggtaaagcgcttatttattcggagagaatccgataaataagaagcatcaaag

SEQ ID NO: 1707 - DNA, 107 bp, Artificial Sequence
  scaffold variant
tactggcgcttttatctcattactttgagagccatcaccagcgactatgtcgtatgggtaaagcgcttatttatggagagaaatccgataaataagaagcatcaaag

SEQ ID NO: 1708 - DNA, 107 bp, Artificial Sequence
  scaffold variant
tacggcgcttttatctcattactttgagagccatcaccagcgactatgtcgtatgggtaaagcgcttatttatcgtagagaaatccgataaataagaagcatcaaag

SEQ ID NO: 1709 - DNA, 109 bp, Artificial Sequence; identical to SEQ ID NO: 1555
  scaffold variant

SEQ ID NO: 1710 - DNA, 110 bp, Artificial Sequence
  scaffold variant
tactggcgcttttatctcattactttgagagccatcaccagcgactatgtcgtatgggtaaagcgcttatttatacggagagaaatctcgataaataagaagcatcaaag

SEQ ID NO: 1711 - DNA, 107 bp, Artificial Sequence
  scaffold variant
actggcgcttttatctcattactttgagagccatcaccagcgactatgtcgtatgggtaaagcgcttatttatcggagagaaatctgataaataagaagcatcaaag

SEQ ID NO: 1712 - DNA, 108 bp, Artificial Sequence
  scaffold variant
tactggcgcttttatctcattactttgagagccatcaccagcgactatgtcgtatgggtaaagcgcttatttacggagagaaatcccgataaataagaagcatcaaag

SEQ ID NO: 1713 - DNA, 107 bp, Artificial Sequence
  scaffold variant
ctggcgcttttatctcattactttgagagccatcaccagcgactatgtcgtatgggtaaagcgcttatttgatcggagagaaatccgataaataagaagcatcaaag

SEQ ID NO: 1714 - DNA, 108 bp, Artificial Sequence
  scaffold variant
tactggcgcttttatctcgattactttgagagccatcaccagcgactatgtcgtatgggtaaagcgcttatttatcggaagaaatccgataaataagaagcatcaaag

SEQ ID NO: 1715 - DNA, 104 bp, Artificial Sequence
  scaffold variant
ggcgcttttatctcattactttgagagccatcaccagcgactatgtcgtatgggtaaagcgcttatttatcggagagaaatccgataaataagaagcatcaaag

SEQ ID NO: 1716 - DNA, 110 bp, Artificial Sequence
  scaffold variant
tactggcgcttttatctcattactttgagagccatcaccagcgactatgtcgtatgggtaaagcgcttatttatgcggagagaaatccgataaataagtaagcatcaaag

SEQ ID NO: 1717 - DNA, 107 bp, Artificial Sequence
  scaffold variant
gctggcgcttttatctcattactttgagagccatcaccagcgactatgtcgtatgggtaaagcgcttatttttcggagagaaatccgataaataagaagcatcaaag

SEQ ID NO: 1718 - DNA, 108 bp, Artificial Sequence
  scaffold variant
tacggcgcttttatctcattactttgagagccatcaccagcgactatgtcgtatgggtaaagcgcttatcttatcggagagaaatccgataaataagaagcatcaaag

SEQ ID NO: 1719 - DNA, 110 bp, Artificial Sequence
  scaffold variant
tactggcgcttttatctctattactttgagagccatcaccagcgactatgtcgtatgggtaaagcgcttatttatcaggagagaaatccgataaataagaagcatcaaag

SEQ ID NO: 1720 - DNA, 110 bp, Artificial Sequence
  scaffold variant
tactggcgcttttatctgcattactttgagagccatcaccagcgactatgtcgtatgggtaaagcgcttatttatcgtgagagaaatccgataaataagaagcatcaaag

SEQ ID NO: 1721 - DNA, 107 bp, Artificial Sequence
  scaffold variant
atggcgcttttatctcattactttgagagccatcaccagcgactatgtcgtatgggtaaagcgcttatttatcggagagaaatctcgataaataagaagcatcaaag

SEQ ID NO: 1722 - DNA, 109 bp, Artificial Sequence; identical to SEQ ID NO: 1183
  scaffold variant

SEQ ID NO: 1723 - DNA, 106 bp, Artificial Sequence
  scaffold variant
gctggcgcttttatctcattactttgagagccatcaccagcgactatgtcgtatgggtaaagcgcttatttatcggagtaaatccgataaataagaagcatcaaag

SEQ ID NO: 1724 - DNA, 105 bp, Artificial Sequence
  scaffold variant
atggcgcttttatctcattactttgagagccatcaccagcgactatgtcgtatgggtaaagcgcttatttatcggaagaaatccgataaataagaagcatcaaag

SEQ ID NO: 1725 - DNA, 106 bp, Artificial Sequence
  scaffold variant
tactggcgcttttatctattactttgagagccatcaccagcgactatgtcgtatgggtaaagcgcttatttatcgggagaaatccgataaataagaagcatcaaag

SEQ ID NO: 1726 - DNA, 107 bp, Artificial Sequence; identical to SEQ ID NO: 1036
  scaffold variant

SEQ ID NO: 1727 - DNA, 109 bp, Artificial Sequence; identical to SEQ ID NO: 1010
  scaffold variant

SEQ ID NO: 1728 - DNA, 107 bp, Artificial Sequence; identical to SEQ ID NO: 1262
  scaffold variant

SEQ ID NO: 1729 - DNA, 107 bp, Artificial Sequence
  scaffold variant
tacggcgcttttatctcattactttgagagccatcaccagcgactatgtcgtatgggtaaagcgcttatttatcggagagaaatccggtaaataagaagcatcaaag

SEQ ID NO: 1730 - DNA, 107 bp, Artificial Sequence
  scaffold variant
tactggcgcttttatctcattactttgagagccatcaccagcgactatgtcgtatgggtaaagcgcttatttatcggagagaaagcgataaataagaagcatcaaag

SEQ ID NO: 1731 - DNA, 109 bp, Artificial Sequence
  scaffold variant
tactggcgcttttatctaattactttgagagccatcaccagcgactatgtcgtatgggtaaagcgcttatttatgcggagagaaatccgataaataagaagcatcaaag

SEQ ID NO: 1732 - DNA, 105 bp, Artificial Sequence; identical to SEQ ID NO: 608
  scaffold variant

SEQ ID NO: 1733 - DNA, 106 bp, Artificial Sequence
  scaffold variant
cctggcgcttttatctcattactttgagagccatcaccagcgactatgtcgtatgggtaaagcgcttatttatcggagtaaatccgataaataagaagcatcaaag

SEQ ID NO: 1734 - DNA, 110 bp, Artificial Sequence
  scaffold variant
ctactggcgcttttatctcattactttgagagccatcaccagcgactatgtcgtatgggtaaagcgcttatttagtcggagagaaatccgataaataagaagcatcaaag

SEQ ID NO: 1735 - DNA, 108 bp, Artificial Sequence
  scaffold variant
gctggcgcttttatctcattactttgagagccatcaccagcgactatgtcgtatgggtaaagcgcttatttatcgcgagagaaatccgataaataagaagcatcaaag

SEQ ID NO: 1736 - DNA, 107 bp, Artificial Sequence; identical to SEQ ID NO: 990
  scaffold variant

SEQ ID NO: 1737 - DNA, 107 bp, Artificial Sequence; identical to SEQ ID NO: 972
  scaffold variant

SEQ ID NO: 1738 - DNA, 109 bp, Artificial Sequence; identical to SEQ ID NO: 1048
  scaffold variant

SEQ ID NO: 1739 - DNA, 110 bp, Artificial Sequence
  scaffold variant
tactggcgcttttattctcattactttgagagccatcaccagcgactatgtcgtatgggtaaagcgcttatttatcaggagagaaatccgataaataagaagcatcaaag

SEQ ID NO: 1740 - DNA, 108 bp, Artificial Sequence
  scaffold variant
ttactggcgcttttatctcattactttgagagccatcaccagcgactatgtcgtatgggtaaagcgcttatttatcggagataatccgataaataagaagcatcaaag

SEQ ID NO: 1741 - DNA, 109 bp, Artificial Sequence; identical to SEQ ID NO: 1010
  scaffold variant

SEQ ID NO: 1742 - DNA, 109 bp, Artificial Sequence; identical to SEQ ID NO: 1183
  scaffold variant

SEQ ID NO: 1743 - DNA, 110 bp, Artificial Sequence
  scaffold variant
atactggcgcttttatctcattactttgagagccatcaccagcgactatgtcgtatgggtaaagcgcttatttatctggagagaaatccgataaataagaagcatcaaag

SEQ ID NO: 1744 - DNA, 107 bp, Artificial Sequence
  scaffold variant
tactggcgcttttatctcattactttgagagccatcaccagcgactatgtcgtatgggtaaagcgcttatttatcggagagaaaacgataaataagaagcatcaaag

SEQ ID NO: 1745 - DNA, 107 bp, Artificial Sequence
  scaffold variant
atggcgcttttatctcattactttgagagccatcaccagcgactatgtcgtatgggtaaagcgcttatttatcggagagaaatcctgataaataagaagcatcaaag

SEQ ID NO: 1746 - DNA, 109 bp, Artificial Sequence; identical to SEQ ID NO: 1183
  scaffold variant

SEQ ID NO: 1747 - DNA, 107 bp, Artificial Sequence; identical to SEQ ID NO: 1262
  scaffold variant

SEQ ID NO: 1748 - DNA, 107 bp, Artificial Sequence; identical to SEQ ID NO: 972
  scaffold variant

SEQ ID NO: 1749 - DNA, 107 bp, Artificial Sequence
  scaffold variant
cctggcgcttttatctcattactttgagagccatcaccagcgactatgtcgtatgggtaaagcgcttatttatcgcagagaaatccgataaataagaagcatcaaag

SEQ ID NO: 1750 - DNA, 107 bp, Artificial Sequence; identical to SEQ ID NO: 915
  scaffold variant

SEQ ID NO: 1751 - DNA, 110 bp, Artificial Sequence
  scaffold variant
tactggcgcttttatcctcattactttgagagccatcaccagcgactatgtcgtagtgggtaaagcgcttatttatcggagagaaatccgataaataagaagcatcaaag

SEQ ID NO: 1752 - DNA, 105 bp, Artificial Sequence
  scaffold variant
actggcgcttttatctcattactttgagagccatcaccagcgactatgtcgtatgggtaaagcgcttatttatcggagagatccgataaataagaagcatcaaag

SEQ ID NO: 1753 - DNA, 107 bp, Artificial Sequence; identical to SEQ ID NO: 915
  scaffold variant

SEQ ID NO: 1754 - DNA, 107 bp, Artificial Sequence; identical to SEQ ID NO: 1691
  scaffold variant

SEQ ID NO: 1755 - DNA, 109 bp, Artificial Sequence; identical to SEQ ID NO: 740
  scaffold variant

SEQ ID NO: 1756 - DNA, 108 bp, Artificial Sequence
  scaffold variant
actggcgcttttatctcattactttgagagccatcaccagcgactatgtcgtatgggtaaagcgcttatcttatcggagagaaatccgataaataagaagcatcaaag

SEQ ID NO: 1757 - DNA, 107 bp, Artificial Sequence
  scaffold variant
tactggcgcttttatctcattactttgagagccatcaccagcgactatgtcgtatgggtaaagcgcttatttatcggaagaaatccgataaataagaagcatcaaag

SEQ ID NO: 1758 - DNA, 109 bp, Artificial Sequence; identical to SEQ ID NO: 740
  scaffold variant

SEQ ID NO: 1759 - DNA, 109 bp, Artificial Sequence; identical to SEQ ID NO: 740
  scaffold variant

SEQ ID NO: 1760 - DNA, 108 bp, Artificial Sequence
  scaffold variant
tactggcgcttttatctcattactttgagagccatcaccagcgactatgtcgtatgggtaaagcgcttatttatgcggagagaaatccgtaaataagaagcatcaaag

SEQ ID NO: 1761 - DNA, 108 bp, Artificial Sequence
  scaffold variant
tactggcgcttttatctattactttgagagccatcaccagcgactatgtcgtagtgggtaaagcgcttatttatcggagagaaatccgataaataagaagcatcaaag

SEQ ID NO: 1762 - DNA, 109 bp, Artificial Sequence; identical to SEQ ID NO: 518
  scaffold variant

SEQ ID NO: 1763 - DNA, 107 bp, Artificial Sequence; identical to SEQ ID NO: 1039
  scaffold variant

SEQ ID NO: 1764 - DNA, 107 bp, Artificial Sequence; identical to SEQ ID NO: 1097
  scaffold variant

SEQ ID NO: 1765 - DNA, 106 bp, Artificial Sequence; identical to SEQ ID NO: 437
  scaffold variant

SEQ ID NO: 1766 - DNA, 109 bp, Artificial Sequence
  scaffold variant
tactggcgcttttatctcattactttgagagccatcaccagcgactatgtcgtatgggtaaagcgcttatttatcggagagaaatccgagtaaataagaagcatcaaag

SEQ ID NO: 1767 - DNA, 107 bp, Artificial Sequence; identical to SEQ ID NO: 1262
  scaffold variant

SEQ ID NO: 1768 - DNA, 108 bp, Artificial Sequence
  scaffold variant
ctactggcgcttttatctcattactttgagagccatcaccagcgactatgtcgtatgggtaaagcgcttatttatccagagaaatccgataaataagaagcatcaaag

SEQ ID NO: 1769 - DNA, 109 bp, Artificial Sequence
  scaffold variant
tactggcgcttttatctcattactttgagagccatcaccagcgactatgtcgtatgggtaaagcgcttatttataaggagagaaatccgataaataagaagcatcaaag

SEQ ID NO: 1770 - DNA, 107 bp, Artificial Sequence; identical to SEQ ID NO: 833
  scaffold variant

SEQ ID NO: 1771 - DNA, 110 bp, Artificial Sequence
  scaffold variant
tactggcgcttttatctgcattactttgagagccatcaccagcgactatgtcgtatgggtaaagcgcttatttaatcggagagaaatccgataaataagaagcatcaaag

SEQ ID NO: 1772 - DNA, 109 bp, Artificial Sequence; identical to SEQ ID NO: 518
  scaffold variant

SEQ ID NO: 1773 - DNA, 106 bp, Artificial Sequence
  scaffold variant
cctggcgcttttatctattactttgagagccatcaccagcgactatgtcgtatgggtaaagcgcttatttatcggagagaaatccgataaataagaagcatcaaag

SEQ ID NO: 1774 - DNA, 108 bp, Artificial Sequence
  scaffold variant
tactggcgcttttatctattactttgagagccatcaccagcgactatgtcgtatgggtaaagcgcttatttatcggagagaaatcctgataaataagaagcatcaaag

SEQ ID NO: 1775 - DNA, 110 bp, Artificial Sequence
  scaffold variant
tactggcgcttttatctcattactttgagagccatcaccagcgactatgtcgtatgggtaaagcgcttatttatgcggagagaaatccgcataaataagaagcatcaaag

SEQ ID NO: 1776 - DNA, 108 bp, Artificial Sequence
  scaffold variant
tactggcgcttttatctcattactttgagagccatcaccagcgactatgtcgtatgggtaaagcgcttatttatcggaaagaaatccgataaataagaagcatcaaag

SEQ ID NO: 1777 - DNA, 106 bp, Artificial Sequence
  scaffold variant
gctggcgcttttatctcattactttgagagccatcaccagcgactatgtcgtatgggtaaagcgcttatttgcggagagaaatccgataaataagaagcatcaaag

SEQ ID NO: 1778 - DNA, 107 bp, Artificial Sequence; identical to SEQ ID NO: 1262
  scaffold variant

SEQ ID NO: 1779 - DNA, 110 bp, Artificial Sequence
  scaffold variant
tactggcgcttttatctcattactttgagagccatcaccagcgactatgtcgtatgggtaaagcgcttatttatgcggagagaaatcctgataaataagaagcatcaaag

SEQ ID NO: 1780 - DNA, 108 bp, Artificial Sequence
  scaffold variant
cctggcgcttttatctacattactttgagagccatcaccagcgactatgtcgtatgggtaaagcgcttatttatcggagagaaatccgataaataagaagcatcaaag

SEQ ID NO: 1781 - DNA, 110 bp, Artificial Sequence
  scaffold variant
tacctggcgcttttatctcattactttgagagccatcaccagcgactatgtcgtatgggtaaagcgcttatttatcggagagaaatcccgataaataagaagcatcaaag

SEQ ID NO: 1782 - DNA, 108 bp, Artificial Sequence; identical to SEQ ID NO: 374
  scaffold variant

SEQ ID NO: 1783 - DNA, 107 bp, Artificial Sequence; identical to SEQ ID NO: 972
  scaffold variant

SEQ ID NO: 1784 - DNA, 106 bp, Artificial Sequence
  scaffold variant
ctggcgcttttatctcattactttgagagccatcaccagcgactatgtcgtatgggtaaagcgcttatttatcggagagaaatccgataaataagaagcatcaaag

SEQ ID NO: 1785 - DNA, 110 bp, Artificial Sequence
  scaffold variant
tactggcgcttttatctcattactttgagagccatcaccagcgactatgtcgtatgggtaaagcgcttattttatcggagagaaatcccgataaataagaagcatcaaag

SEQ ID NO: 1786 - DNA, 109 bp, Artificial Sequence
  scaffold variant
tactggcgcttttatctcattactttgagagccatcaccagcgactatgtcgtatgggtaaagcgcttatttaatcggagagaaatccgataaataagaagcatcaaag

SEQ ID NO: 1787 - DNA, 107 bp, Artificial Sequence; identical to SEQ ID NO: 972
  scaffold variant

SEQ ID NO: 1788 - DNA, 108 bp, Artificial Sequence
  scaffold variant
actggcgcttttatctcattactttgagagccatcaccagcgactatgtcgtatgggtaaagcgcttattgtatcggagagaaatccgataaataagaagcatcaaag

SEQ ID NO: 1789 - DNA, 108 bp, Artificial Sequence
  scaffold variant
tactggcgcttttatctcattactttgagagccatcaccagcgactatgtcgtattgggtaaagcgcttatttatcaagagaaatccgataaataagaagcatcaaag

SEQ ID NO: 1790 - DNA, 108 bp, Artificial Sequence
  scaffold variant
actggcgcttttatctcattactttgagagccatcaccagcgactatgtcgtatgggtaaagcgcttatttatcggagagaaatccgataaataagatagcatcaaag

SEQ ID NO: 1791 - DNA, 107 bp, Artificial Sequence; identical to SEQ ID NO: 833
  scaffold variant

SEQ ID NO: 1792 - DNA, 107 bp, Artificial Sequence; identical to SEQ ID NO: 1036
  scaffold variant

SEQ ID NO: 1793 - DNA, 109 bp, Artificial Sequence; identical to SEQ ID NO: 948
  scaffold variant

SEQ ID NO: 1794 - DNA, 109 bp, Artificial Sequence; identical to SEQ ID NO: 518
  scaffold variant

SEQ ID NO: 1795 - DNA, 108 bp, Artificial Sequence
  scaffold variant
tactggcgcttttatctcattactttgagagccatcaccagcgactatgtcgtatgggtaaagcgcttatttatcgggagagaaatccataaataagaagcatcaaag

SEQ ID NO: 1796 - DNA, 109 bp, Artificial Sequence; identical to SEQ ID NO: 947
  scaffold variant

SEQ ID NO: 1797 - DNA, 107 bp, Artificial Sequence; identical to SEQ ID NO: 1337
  scaffold variant

SEQ ID NO: 1798 - DNA, 109 bp, Artificial Sequence; identical to SEQ ID NO: 912
  scaffold variant

SEQ ID NO: 1799 - DNA, 108 bp, Artificial Sequence
  scaffold variant
tactggcgcttttatctcattactttcgagagccatcaccagcgactatgtcgtatgggtaaagcgcttatttatcggagagaaatggataaataagaagcatcaaag

SEQ ID NO: 1800 - DNA, 108 bp, Artificial Sequence
  scaffold variant
tactggcgcttttatctctattactttgagagccatcaccagcgactatgtcgtatgggtaaagcgcttatttatcggagagaaatccctaaataagaagcatcaaag

SEQ ID NO: 1801 - DNA, 106 bp, Artificial Sequence
  scaffold variant
tctggcgcttttatctcattactttgagagccatcaccagcgactatgtcgtatgggtaaagcgcttatttatcggagagaaagcgataaataagaagcatcaaag

SEQ ID NO: 1802 - DNA, 108 bp, Artificial Sequence
  scaffold variant
cctggcgcttttatctcaattactttgagagccatcaccagcgactatgtcgtatgggtaaagcgcttatttatcggagagaaatccgataaataagaagcatcaaag

SEQ ID NO: 1803 - DNA, 108 bp, Artificial Sequence
  scaffold variant
tactggcgcttttatctcattactttgagagccatcaccagcgactatgtcgtatgggtaaagcgcttatttattcggagagaaatccataaataagaagcatcaaag

SEQ ID NO: 1804 - DNA, 109 bp, Artificial Sequence
  scaffold variant
tactggcgcttttatttcattactttgagagccatcaccagcgactatgtcgtatgggtaaagcgcttatttatgcggagagaaatccgataaataagaagcatcaaag

SEQ ID NO: 1805 - DNA, 106 bp, Artificial Sequence
  scaffold variant
gctggcgcttttatctcattactttgagagccatcaccagcgactatgtcgtatgggtaaagcgcttatttatcggagagaaatccataaataagaagcatcaaag

SEQ ID NO: 1806 - DNA, 110 bp, Artificial Sequence
  scaffold variant
ttactggcgcttttatctcattactttgagagccatcaccagcgactatgtcgtatgggtaaagcgcttattatatcggagagaaatccgataaataagaagcatcaaag

SEQ ID NO: 1807 - DNA, 107 bp, Artificial Sequence; identical to SEQ ID NO: 1262
  scaffold variant

SEQ ID NO: 1808 - DNA, 108 bp, Artificial Sequence
  scaffold variant
ttactggcgcttttatctcattactttgagagccatcaccagcgactatgtcgtatgggtaaagcgcttatttatcggaagaaatccgataaataagaagcatcaaag

SEQ ID NO: 1809 - DNA, 107 bp, Artificial Sequence; identical to SEQ ID NO: 990
  scaffold variant

SEQ ID NO: 1810 - DNA, 107 bp, Artificial Sequence; identical to SEQ ID NO: 1678
  scaffold variant

SEQ ID NO: 1811 - DNA, 110 bp, Artificial Sequence
  scaffold variant
tactggcgcttttatcttcattactttgagagccatcaccagcgactatgtcgtatgggtaaagcgcttatttatcggagagaaatccgagtaaataagaagcatcaaag

SEQ ID NO: 1812 - DNA, 109 bp, Artificial Sequence; identical to SEQ ID NO: 1119
  scaffold variant

SEQ ID NO: 1813 - DNA, 110 bp, Artificial Sequence
  scaffold variant
tactggcgcttttaatctcattactttgagagccatcaccagcgactatgtcgtatgggtaaagcgcttattctatcggagagaaatccgataaataagaagcatcaaag

SEQ ID NO: 1814 - DNA, 107 bp, Artificial Sequence; identical to SEQ ID NO: 833
  scaffold variant

SEQ ID NO: 1815 - DNA, 109 bp, Artificial Sequence; identical to SEQ ID NO: 1183
  scaffold variant

SEQ ID NO: 1816 - DNA, 110 bp, Artificial Sequence
  scaffold variant
tactggcgcttttatctcattactttgagagccatcaccagcgactatgtcgtatgggtaaagcgcttatttatgcggagagaaatccgataaataagaagcatcaaagc

SEQ ID NO: 1817 - DNA, 109 bp, Artificial Sequence; identical to SEQ ID NO: 740
  scaffold variant

SEQ ID NO: 1818 - DNA, 107 bp, Artificial Sequence; identical to SEQ ID NO: 1262
  scaffold variant

SEQ ID NO: 1819 - DNA, 110 bp, Artificial Sequence
  scaffold variant
atactggcgcttttatctcattactttgagagccatcaccagcgactatgtcgtatgggtaaagcgcttatttatccggagagaaatccgataaataagaagcatcaaag

SEQ ID NO: 1820 - DNA, 107 bp, Artificial Sequence; identical to SEQ ID NO: 833
  scaffold variant

SEQ ID NO: 1821 - DNA, 107 bp, Artificial Sequence; identical to SEQ ID NO: 1691
  scaffold variant

SEQ ID NO: 1822 - DNA, 108 bp, Artificial Sequence
  scaffold variant
gctggcgcttttatctcattactttgagagccatcaccagcgactatgtcgtatgggtaaagcgcttatttatcggtagagaaatccgataaataagaagcatcaaag

SEQ ID NO: 1823 - DNA, 107 bp, Artificial Sequence
  scaffold variant
atggcgcttttatctcattactttgagagccatcaccagcgactatgtcgtatgggtaaagcgcttatttatcaggagagaaatccgataaataagaagcatcaaag

SEQ ID NO: 1824 - DNA, 107 bp, Artificial Sequence; identical to SEQ ID NO: 765
  scaffold variant

SEQ ID NO: 1825 - DNA, 107 bp, Artificial Sequence
  scaffold variant
tactggcgcttttatctgcattactttgagagccatcaccagcgactatgtcgtatgggtaaagcgcttatttatcggagagatccgataaataagaagcatcaaag

SEQ ID NO: 1826 - DNA, 107 bp, Artificial Sequence
  scaffold variant
atggcgcttttatctcattactttgagagccatcaccagcgactatgtcgtatgggtaaagcgcttatttatcggagagaaatccgataaataagagagcatcaaag

SEQ ID NO: 1827 - DNA, 109 bp, Artificial Sequence; identical to SEQ ID NO: 980
  scaffold variant

SEQ ID NO: 1828 - DNA, 108 bp, Artificial Sequence
  scaffold variant
tactggcgcttttaatctcattactttgagagccatcaccagcgactatgtcgtatgggtaaagcgcttatttattgagagaaatccgataaataagaagcatcaaag

SEQ ID NO: 1829 - DNA, 107 bp, Artificial Sequence
  scaffold variant
ctactggcgcttttatctcattactttgagagccatcaccagcgactatgtcgtatgggtaaagcgcttatttatcggagaaatccgataaataagaagcatcaaag

SEQ ID NO: 1830 - DNA, 107 bp, Artificial Sequence; identical to SEQ ID NO: 1091
  scaffold variant

SEQ ID NO: 1831 - DNA, 109 bp, Artificial Sequence; identical to SEQ ID NO: 910
  scaffold variant

SEQ ID NO: 1832 - DNA, 110 bp, Artificial Sequence
  scaffold variant
tactggcgcttttatctcattactttgagagccatcaccagcgactatgtcgtatgggtaaagcgcttatttatgcggagagaaatccgataaataagagagcatcaaag

SEQ ID NO: 1833 - DNA, 108 bp, Artificial Sequence
  scaffold variant
gctggcgcttttatctcattactttgagagccatcaccagcgactatgtcgtatgggtaaagcgcttatttatcggagagaaatccgataaataagtaagcatcaaag

SEQ ID NO: 1834 - DNA, 109 bp, Artificial Sequence; identical to SEQ ID NO: 740
  scaffold variant

SEQ ID NO: 1835 - DNA, 110 bp, Artificial Sequence
  scaffold variant
tactggcgcttttatctcattactttgagagccatcaccagcgactatgtcgtatgggtaaagcgcttatttatgcggagagaaaatccgataaataagaagcatcaaag

SEQ ID NO: 1836 - DNA, 107 bp, Artificial Sequence; identical to SEQ ID NO: 833
  scaffold variant

SEQ ID NO: 1837 - DNA, 107 bp, Artificial Sequence; identical to SEQ ID NO: 833
  scaffold variant

SEQ ID NO: 1838 - DNA, 107 bp, Artificial Sequence; identical to SEQ ID NO: 563
  scaffold variant

SEQ ID NO: 1839 - DNA, 108 bp, Artificial Sequence
  scaffold variant
tactggcgcttttatctcattactttgagagccatcaccagcgactatgtcgtatgggtaaagcgcttatctatcggagagaaatccgataaataagaagcatcaaag

SEQ ID NO: 1840 - DNA, 108 bp, Artificial Sequence
  scaffold variant
tactggcgcttttatcatcattactttgagagccatcaccagcgactatgtcgtatgggtaaagcgcttatttatcggagagaaatcgataaataagaagcatcaaag

SEQ ID NO: 1841 - DNA, 106 bp, Artificial Sequence; identical to SEQ ID NO: 459
  scaffold variant

SEQ ID NO: 1842 - DNA, 107 bp, Artificial Sequence; identical to SEQ ID NO: 1337
  scaffold variant

SEQ ID NO: 1843 - DNA, 110 bp, Artificial Sequence
  scaffold variant
tactggcgcttttatctctattactttgagagccatcaccagcgactatgtcgtatgggtaaagcgcttatttatcggagagaaatcacgataaataagaagcatcaaag

SEQ ID NO: 1844 - DNA, 107 bp, Artificial Sequence
  scaffold variant
tactggcgcttttatctcattactttgagagccatcaccagcgactatgtcgtatgggtaaagcgcttatttatcggaggaaatccgataaataagaagcatcaaag

SEQ ID NO: 1845 - DNA, 108 bp, Artificial Sequence
  scaffold variant
tactggcgcttttatctgcattactttgagagccatcaccagcgactatgtcgtatgggtaaagcgcttatttatcggagagaatccgataaataagaagcatcaaag

SEQ ID NO: 1846 - DNA, 109 bp, Artificial Sequence; identical to SEQ ID NO: 1183
  scaffold variant

SEQ ID NO: 1847 - DNA, 107 bp, Artificial Sequence
  scaffold variant
tacggcgcttttatctcattactttgagagccatcaccagcgactatgtcgtatgggtaaagcgcttatttatcggagagaaatcagataaataagaagcatcaaag

SEQ ID NO: 1848 - DNA, 110 bp, Artificial Sequence
  scaffold variant
tactggcgcttttaatctcattactttgagagccatcaccagcgactatgtcgtatgggtaaagcgcttatttagtcggagagaaatccgataaataagaagcatcaaag

SEQ ID NO: 1849 - DNA, 110 bp, Artificial Sequence
  scaffold variant
tactggcgcttttatcatcattactttgagagccatcaccagcgactatgtcgtatgggtaaagcgcttatttatctggagagaaatccgataaataagaagcatcaaag

SEQ ID NO: 1850 - DNA, 110 bp, Artificial Sequence
  scaffold variant
tactggcgcttttatcctcattactttgagagccatcaccagcgactatgtcgtatgggtaaagcgcttatttatcggtagagaaatccgataaataagaagcatcaaag

SEQ ID NO: 1851 - DNA, 106 bp, Artificial Sequence
  scaffold variant
actggcgcttttatctcattactttgagagccatcaccagcgactatgtcgtatgggtaaagctttatttatcggagagaaatccgataaataagaagcatcaaag

SEQ ID NO: 1852 - DNA, 108 bp, Artificial Sequence
  scaffold variant
tactggcgcttttatctctattactttgagagccatcaccagcgactatgtcgtatgggtaaagcgcttatttatcggagaggatccgataaataagaagcatcaaag

SEQ ID NO: 1853 - DNA, 108 bp, Artificial Sequence
  scaffold variant
ctactggcgcttttatctcattactttgagagccatcaccagcgactatgtcgtatgggtaaagcgcttatttatcgcgagaaatccgataaataagaagcatcaaag

SEQ ID NO: 1854 - DNA, 108 bp, Artificial Sequence
  scaffold variant
actggcgcttttatctcgattactttgagagccatcaccagcgactatgtcgtatgggtaaagcgcttatttatcggagagaaatccgataaataagaagcatcaaag

SEQ ID NO: 1855 - DNA, 110 bp, Artificial Sequence
  scaffold variant
ttactggcgcttttatctcattactttgagagccatcaccagcgactatgtcgtatgggtaaagcgcttatttatcggagagaaatcctgataaataagaagcatcaaag

SEQ ID NO: 1856 - DNA, 109 bp, Artificial Sequence
  scaffold variant
tactggcgcttttattctcattactttgagagccatcaccagcgactatgtcgtatgggtaaagcgcttatttatcggcgagaaatccgataaataagaagcatcaaag

SEQ ID NO: 1857 - DNA, 107 bp, Artificial Sequence; identical to SEQ ID NO: 515
  scaffold variant

SEQ ID NO: 1858 - DNA, 106 bp, Artificial Sequence
  scaffold variant
tactggcgcttttatctattactttgagagccatcaccagcgactatgtcgtatgggtaaagcgcttatttatcggagagaaatcgataaataagaagcatcaaag

SEQ ID NO: 1859 - DNA, 109 bp, Artificial Sequence
  scaffold variant
tactggcgcttttattctcattactttgagagccatcaccagcgactatgtcgtatgggtaaagcgcttatttgtcggagagaaatccgataaataagaagcatcaaag

SEQ ID NO: 1860 - DNA, 105 bp, Artificial Sequence; identical to SEQ ID NO: 909
  scaffold variant

SEQ ID NO: 1861 - DNA, 109 bp, Artificial Sequence; identical to SEQ ID NO: 571
  scaffold variant

SEQ ID NO: 1862 - DNA, 109 bp, Artificial Sequence; identical to SEQ ID NO: 1145
  scaffold variant

SEQ ID NO: 1863 - DNA, 108 bp, Artificial Sequence
  scaffold variant
tactggcgcttttatctcattactttgagagccatcaccagcgactatgtcgtatgggtaaagcgcttatttatgcggagaggatccgataaataagaagcatcaaag

SEQ ID NO: 1864 - DNA, 110 bp, Artificial Sequence
  scaffold variant
tactggcgcttttatctcattactttgagagccatcaccagcgactatgtcgtagtgggtaaagcgcttatttatcggagagaaatcccgataaataagaagcatcaaag

SEQ ID NO: 1865 - DNA, 106 bp, Artificial Sequence
  scaffold variant
tactggcgcttttaatcattactttgagagccatcaccagcgactatgtcgtatgggtaaagcgcttatttatcgagagaaatccgataaataagaagcatcaaag

SEQ ID NO: 1866 - DNA, 106 bp, Artificial Sequence
  scaffold variant
tactggcgcttttatctcattactttgagagccatcaccagcgactatgtcgtatgggtaaagcgcttatttatcgagagaaatcgataaataagaagcatcaaag

SEQ ID NO: 1867 - DNA, 108 bp, Artificial Sequence
  scaffold variant
actggcgcttttatctcattactttgagagccatcaccagcgactatgtcgtatgggtaaagcgcttatttatcggagagaaatccggataaataagaagcatcaaag

SEQ ID NO: 1868 - DNA, 109 bp, Artificial Sequence; identical to SEQ ID NO: 980
  scaffold variant

SEQ ID NO: 1869 - DNA, 105 bp, Artificial Sequence
  scaffold variant
atggcgcttttatctcattactttgagagccatcaccagcgactatgtcgtatgggtaaagcgcttatttatcggagagtatccgataaataagaagcatcaaag

SEQ ID NO: 1870 - DNA, 108 bp, Artificial Sequence
  scaffold variant
actggcgcttttatctcattactttgagagccatcaccagcgactatgtcgtatgggtaaagcgcttatttatcggagagaaatccgagtaaataagaagcatcaaag

SEQ ID NO: 1871 - DNA, 108 bp, Artificial Sequence
  scaffold variant
tactggcgcttttatctattactttgagagccatcaccagcgactatgtcgtatgggtaaagcgcttatttatcggcagagaaatccgataaataagaagcatcaaag

SEQ ID NO: 1872 - DNA, 108 bp, Artificial Sequence
  scaffold variant
tactggcgcttttatctcattactttgagagccatcaccagcgactatgtcgtatgggtaaagcgcttatttatcgagagaaatcccgataaataagaagcatcaaag

SEQ ID NO: 1873 - DNA, 109 bp, Artificial Sequence; identical to SEQ ID NO: 1010
  scaffold variant

SEQ ID NO: 1874 - DNA, 107 bp, Artificial Sequence
  scaffold variant
atggcgcttttatctcattactttgagagccatcaccagcgactatgtcgtatgggtaaagcgcttattatatcggagagaaatccgataaataagaagcatcaaag

SEQ ID NO: 1875 - DNA, 107 bp, Artificial Sequence; identical to SEQ ID NO: 1036
  scaffold variant

SEQ ID NO: 1876 - DNA, 107 bp, Artificial Sequence; identical to SEQ ID NO: 1678
  scaffold variant

SEQ ID NO: 1877 - DNA, 109 bp, Artificial Sequence; identical to SEQ ID NO: 980
  scaffold variant

SEQ ID NO: 1878 - DNA, 108 bp, Artificial Sequence
  scaffold variant
actggcgcttttatctgcattactttgagagccatcaccagcgactatgtcgtatgggtaaagcgcttatttatcggagagaaatccgataaataagaagcatcaaag

SEQ ID NO: 1879 - DNA, 108 bp, Artificial Sequence
  scaffold variant
tactggcgcttttatctcattactttgagagccatcaccagcgactatgtcgtatgggtaaagcgcttatttatcggggagaaatccgataaataagaagcatcaaag

SEQ ID NO: 1880 - DNA, 110 bp, Artificial Sequence
  scaffold variant
tactggcgcttttatctcattactttgagagccatcaccagcgactatgtcgtatgggtaaagcgcttatttagtcggagagaaatcccgataaataagaagcatcaaag

SEQ ID NO: 1881 - DNA, 106 bp, Artificial Sequence
  scaffold variant
gctggcgcttttatctcattactttgagagccatcaccagcgactatgtcgtatgggtaaagcgcttatttatcggtagaaatccgataaataagaagcatcaaag

SEQ ID NO: 1882 - DNA, 107 bp, Artificial Sequence
  scaffold variant
tactggcgcttttatctcattactttgagagccatcaccagcgactatgtcgtatgggtaaagcgcttatttatcggcagaaatccgataaataagaagcatcaaag

SEQ ID NO: 1883 - DNA, 110 bp, Artificial Sequence
  scaffold variant
tactggcgcttttatcctcattactttgagagccatcaccagcgactatgtcgtatgggtaaagcgcttatttatcgagagagaaatccgataaataagaagcatcaaag

SEQ ID NO: 1884 - DNA, 106 bp, Artificial Sequence
  scaffold variant
actggcgcttttatctcattactttgagagccatcaccagcgactatgtcgtatgggtaaagcgcttatttatcggagagaaatccctaaataagaagcatcaaag

SEQ ID NO: 1885 - DNA, 107 bp, Artificial Sequence; identical to SEQ ID NO: 1757
  scaffold variant

SEQ ID NO: 1886 - DNA, 107 bp, Artificial Sequence; identical to SEQ ID NO: 1091
  scaffold variant

SEQ ID NO: 1887 - DNA, 107 bp, Artificial Sequence; identical to SEQ ID NO: 1262
  scaffold variant

SEQ ID NO: 1888 - DNA, 110 bp, Artificial Sequence
  scaffold variant
tactggcgcttttatcctcattactttgagagccatcaccagcgactatgtcgtatgggtaaagcgcttatttatcggagagaaataccgataaataagaagcatcaaag

SEQ ID NO: 1889 - DNA, 106 bp, Artificial Sequence; identical to SEQ ID NO: 1784
  scaffold variant

SEQ ID NO: 1890 - DNA, 106 bp, Artificial Sequence; identical to SEQ ID NO: 988
  scaffold variant

SEQ ID NO: 1891 - DNA, 107 bp, Artificial Sequence
  scaffold variant
tactggcgcttttatctcattactttgagagccatcaccagcgactatgtcgtatgggtaaagcgcttatttatcggagattatccgataaataagaagcatcaaag

SEQ ID NO: 1892 - DNA, 110 bp, Artificial Sequence
  scaffold variant
tactggcgcttttatctcattactttgagagccatcaccagcgactatgtcgtattgggtaaagcgcttatttatccggagagaaatccgataaataagaagcatcaaag

SEQ ID NO: 1893 - DNA, 110 bp, Artificial Sequence
  scaffold variant
ttactggcgcttttatctcattactttgagagccatcaccagcgactatgtcgtatgggtaaagcgcttatttatccggagagaaatccgataaataagaagcatcaaag

SEQ ID NO: 1894 - DNA, 109 bp, Artificial Sequence; identical to SEQ ID NO: 1010
  scaffold variant

SEQ ID NO: 1895 - DNA, 108 bp, Artificial Sequence
  scaffold variant
tactggcgcttttatctctattactttgagagccatcaccagcgactatgtcgtatgggtaaagcgcttatttatcgcgagaaatccgataaataagaagcatcaaag

SEQ ID NO: 1896 - DNA, 109 bp, Artificial Sequence; identical to SEQ ID NO: 837
  scaffold variant

SEQ ID NO: 1897 - DNA, 107 bp, Artificial Sequence; identical to SEQ ID NO: 1262
  scaffold variant

SEQ ID NO: 1898 - DNA, 107 bp, Artificial Sequence
  scaffold variant
gctggcgcttttatctcattactttgagagccatcaccagcgactatgtcgtatgggtaaagcgcttatttatcggcgagaaatccgataaataagaagcatcaaag

SEQ ID NO: 1899 - DNA, 104 bp, Artificial Sequence
  scaffold variant
ctggcgcttttatctcattactttgagagccatcaccagcgactatgtcgtatgggtaaagcgcttatttatcggggaaatccgataaataagaagcatcaaag

SEQ ID NO: 1900 - DNA, 108 bp, Artificial Sequence
  scaffold variant
tactggcgcttttatctgcattactttgagagccatcaccagcgactatgtcgtatgggtaaagcgcttatttatccagagaaatccgataaataagaagcatcaaag

SEQ ID NO: 1901 - DNA, 107 bp, Artificial Sequence; identical to SEQ ID NO: 1036
  scaffold variant

SEQ ID NO: 1902 - DNA, 110 bp, Artificial Sequence
  scaffold variant
tactggcgcttttatctcattactttgagagccatcaccagcgactatgtcgtatgggtaaagcgcttatttatcgggagagaaatccgataaataagtaagcatcaaag

SEQ ID NO: 1903 - DNA, 109 bp, Artificial Sequence; identical to SEQ ID NO: 980
  scaffold variant

SEQ ID NO: 1904 - DNA, 107 bp, Artificial Sequence; identical to SEQ ID NO: 1097
  scaffold variant

SEQ ID NO: 1905 - DNA, 107 bp, Artificial Sequence
  scaffold variant
tactggcgcctttatctcattactttgagagccatcaccagcgactatgtcgtatgggtaaagcgcttatttatcgagagaaatccgataaataagaagcatcaaag

SEQ ID NO: 1906 - DNA, 108 bp, Artificial Sequence
  scaffold variant
tactggcgcttttaatctcattactttgagagccatcaccagcgactatgtcgtatgggtaaagcgcttatttatcgggagaaatccgataaataagaagcatcaaag

SEQ ID NO: 1907 - DNA, 107 bp, Artificial Sequence
  scaffold variant
ctggcgcttttatctcattactttgagagccatcaccagcgactatgtcgtatgggtaaagcgcttatttatcggagagaaatccgagtaaataagaagcatcaaag

SEQ ID NO: 1908 - DNA, 108 bp, Artificial Sequence
  scaffold variant
tactggcgcttttattctcattactttgagagccatcaccagcgactatgtcgtatgggtaaagcgcttatttatcggagtaaatccgataaataagaagcatcaaag

SEQ ID NO: 1909 - DNA, 109 bp, Artificial Sequence
  scaffold variant
ttactggcgcttttatctcattactttgagagccatcaccagcgactatgtcgtatgggtaaagcgcttatttatcggtgagaaatccgataaataagaagcatcaaag

SEQ ID NO: 1910 - DNA, 109 bp, Artificial Sequence; identical to SEQ ID NO: 980
  scaffold variant

SEQ ID NO: 1911 - DNA, 110 bp, Artificial Sequence
  scaffold variant
tactggcgcttttatcttcattactttgagagccatcaccagcgactatgtcgtatgggtaaagcgcttatttatcgtgagagaaatccgataaataagaagcatcaaag

SEQ ID NO: 1912 - DNA, 107 bp, Artificial Sequence
  scaffold variant
tacggcgcttttatctcattactttgagagccatcaccagcgactatgtcgtatgggtaaagcgcttatttatctgagagaaatccgataaataagaagcatcaaag

SEQ ID NO: 1913 - DNA, 109 bp, Artificial Sequence; identical to SEQ ID NO: 571
  scaffold variant

SEQ ID NO: 1914 - DNA, 108 bp, Artificial Sequence; identical to SEQ ID NO: 405
  scaffold variant

SEQ ID NO: 1915 - DNA, 107 bp, Artificial Sequence
  scaffold variant
tctggcgcttttatctcattactttgagagccatcaccagcgactatgtcgtatgggtaaagcgcttatttatcggagagaaatccgataaataagaagcatcaaag

SEQ ID NO: 1916 - DNA, 108 bp, Artificial Sequence
  scaffold variant
tactggcgcttttatcctcattactttgagagccatcaccagcgactatgtcgtatgggtaaagcgcttatttatcggagagaaatccgatagtaagaagcatcaaag

SEQ ID NO: 1917 - DNA, 109 bp, Artificial Sequence
  scaffold variant
cctggcgcttttattctcattactttgagagccatcaccagcgactatgtcgtatgggtaaagcgcttatttatgcggagagaaatccgataaataagaagcatcaaag

SEQ ID NO: 1918 - DNA, 109 bp, Artificial Sequence; identical to SEQ ID NO: 1048
  scaffold variant

SEQ ID NO: 1919 - DNA, 106 bp, Artificial Sequence
  scaffold variant
gctggcgcttttatctcattactttgagagccatcaccagcgactatgtcgtatgggtaaagcgcttatttatcggagagtatccgataaataagaagcatcaaag

SEQ ID NO: 1920 - DNA, 109 bp, Artificial Sequence; identical to SEQ ID NO: 1010
  scaffold variant

SEQ ID NO: 1921 - DNA, 107 bp, Artificial Sequence
  scaffold variant
tactggcgcttttatctcattactttgagagccatcaccagcgactatgtcgtatgggtaaagcggtatttatcggagagaaatccgataaataagaagcatcaaag

SEQ ID NO: 1922 - DNA, 107 bp, Artificial Sequence; identical to SEQ ID NO: 1426
  scaffold variant

SEQ ID NO: 1923 - DNA, 106 bp, Artificial Sequence
  scaffold variant
tggcgcttttatctcattactttgagagccatcaccagcgactatgtcgtatgggtaaagcgcttatttagtcggagagaaatccgataaataagaagcatcaaag

SEQ ID NO: 1924 - DNA, 107 bp, Artificial Sequence; identical to SEQ ID NO: 1678
  scaffold variant

SEQ ID NO: 1925 - DNA, 107 bp, Artificial Sequence; identical to SEQ ID NO: 1091
  scaffold variant

SEQ ID NO: 1926 - DNA, 105 bp, Artificial Sequence
  scaffold variant
cctggcgcttttatctcattactttgagagccatcaccagcgactatgtcgtatgggtaaagcgcttatttatcggtgaaatccgataaataagaagcatcaaag

SEQ ID NO: 1927 - DNA, 107 bp, Artificial Sequence
  scaffold variant
tacggcgcttttatctcattactttgagagccatcaccagcgactatgtcgtatgggtaaagcgcttatttatcggagagaaatccgataaataagaagcatcaaag

SEQ ID NO: 1928 - DNA, 108 bp, Artificial Sequence
  scaffold variant
gatggcgcttttatctcattactttgagagccatcaccagcgactatgtcgtatgggtaaagcgcttatttatgcggagagaaatccgataaataagaagcatcaaag

SEQ ID NO: 1929 - DNA, 107 bp, Artificial Sequence; identical to SEQ ID NO: 833
  scaffold variant

SEQ ID NO: 1930 - DNA, 108 bp, Artificial Sequence
  scaffold variant
tactggcgcttttatctctattactttgagagccatcaccagcgactatgtcgtatgggtaaagcgcttatttatcggagaaaatccgataaataagaagcatcaaag

SEQ ID NO: 1931 - DNA, 108 bp, Artificial Sequence
  scaffold variant
tactggcgcttttatcctcattactttgagagccatcaccagcgactatgtcgtatgggtaaagcgcttatttatcggtagaaatccgataaataagaagcatcaaag

SEQ ID NO: 1932 - DNA, 109 bp, Artificial Sequence; identical to SEQ ID NO: 948
  scaffold variant

SEQ ID NO: 1933 - DNA, 107 bp, Artificial Sequence; identical to SEQ ID NO: 1036
  scaffold variant

SEQ ID NO: 1934 - DNA, 106 bp, Artificial Sequence
  scaffold variant
tactggcgcttttatctcattactttgagagccatcaccagcgactatgtcgtatgggtaaagcgcttatttatcggagaaatccgataaataagaagcatcaaag

SEQ ID NO: 1935 - DNA, 110 bp, Artificial Sequence
  scaffold variant
ttactggcgcttttatctcattactttgagagccatcaccagcgactatgtcgtatgggtaaagcgcttatttatcgggagagaaatccgataaataagaagcatcaaag

SEQ ID NO: 1936 - DNA, 110 bp, Artificial Sequence
  scaffold variant
tactggcgcttttatctcattactttgagagccatcaccagcgactatgtcgtatgggtaaagcgcttatttatccggagagaaatctcgataaataagaagcatcaaag

SEQ ID NO: 1937 - DNA, 109 bp, Artificial Sequence; identical to SEQ ID NO: 910
  scaffold variant

SEQ ID NO: 1938 - DNA, 107 bp, Artificial Sequence; identical to SEQ ID NO: 1707
  scaffold variant

SEQ ID NO: 1939 - DNA, 106 bp, Artificial Sequence; identical to SEQ ID NO: 469
  scaffold variant

SEQ ID NO: 1940 - DNA, 110 bp, Artificial Sequence
  scaffold variant
tactggcgcttttatactcattactttgagagccatcaccagcgactatgtcgtatgggtaaagcgcttatttatcgagagagaaatccgataaataagaagcatcaaag

SEQ ID NO: 1941 - DNA, 107 bp, Artificial Sequence; identical to SEQ ID NO: 972
  scaffold variant

SEQ ID NO: 1942 - DNA, 110 bp, Artificial Sequence
  scaffold variant
ttactggcgcttttatctcattactttgagagccatcaccagcgactatgtcgtattgggtaaagcgcttatttatcggagagaaatccgataaataagaagcatcaaag

SEQ ID NO: 1943 - DNA, 107 bp, Artificial Sequence; identical to SEQ ID NO: 1262
  scaffold variant

SEQ ID NO: 1944 - DNA, 107 bp, Artificial Sequence; identical to SEQ ID NO: 1757
  scaffold variant

SEQ ID NO: 1945 - DNA, 109 bp, Artificial Sequence; identical to SEQ ID NO: 980
  scaffold variant

SEQ ID NO: 1946 - DNA, 107 bp, Artificial Sequence; identical to SEQ ID NO: 1262
  scaffold variant

SEQ ID NO: 1947 - DNA, 107 bp, Artificial Sequence; identical to SEQ ID NO: 1927
  scaffold variant

SEQ ID NO: 1948 - DNA, 106 bp, Artificial Sequence
  scaffold variant
tactggcgcttttatctattactttgagagccatcaccagcgactatgtcgtatgggtaaagcgcttatttatcgagagaaatccgataaataagaagcatcaaag

SEQ ID NO: 1949 - DNA, 107 bp, Artificial Sequence; identical to SEQ ID NO: 1691
  scaffold variant

SEQ ID NO: 1950 - DNA, 107 bp, Artificial Sequence; identical to SEQ ID NO: 915
  scaffold variant

SEQ ID NO: 1951 - DNA, 109 bp, Artificial Sequence; identical to SEQ ID NO: 1786
  scaffold variant

SEQ ID NO: 1952 - DNA, 106 bp, Artificial Sequence
  scaffold variant
tactggcgcttttatctattactttgagagccatcaccagcgactatgtcgtatgggtaaagcgcttatttatcaagagaaatccgataaataagaagcatcaaag

SEQ ID NO: 1953 - DNA, 106 bp, Artificial Sequence
  scaffold variant
ctggcgcttttatctcattactttgagagccatcaccagcgactatgtcgtatgggtaaagcgcttatttttcggagagaaatccgataaataagaagcatcaaag

SEQ ID NO: 1954 - DNA, 105 bp, Artificial Sequence; identical to SEQ ID NO: 506
  scaffold variant

SEQ ID NO: 1955 - DNA, 108 bp, Artificial Sequence
  scaffold variant
tactggcgcttttattctcattactttgagagccatcaccagcgactatgtcgtatgggtaaagcgcttatttatcggacgaaatccgataaataagaagcatcaaag

SEQ ID NO: 1956 - DNA, 107 bp, Artificial Sequence
  scaffold variant
gctggcgcttttatctcattactttgagagccatcaccagcgactatgtcgtatgggtaaagcgcttatttagcggagagaaatccgataaataagaagcatcaaag

SEQ ID NO: 1957 - DNA, 110 bp, Artificial Sequence
  scaffold variant
tactggcgcttttatctcattactttgagagccatcaccagcgactatgtcgtatgggtaaagcgcttatttatccggagagaaatccgataaataagagagcatcaaag

SEQ ID NO: 1958 - DNA, 107 bp, Artificial Sequence; identical to SEQ ID NO: 1915
  scaffold variant

SEQ ID NO: 1959 - DNA, 110 bp, Artificial Sequence; identical to SEQ ID NO: 392
  scaffold variant

SEQ ID NO: 1960 - DNA, 106 bp, Artificial Sequence; identical to SEQ ID NO: 688
  scaffold variant

SEQ ID NO: 1961 - DNA, 106 bp, Artificial Sequence
  scaffold variant
actggcgcttttatctcattactttgagagccatcaccagcgactatgtcgtatgggtaaagcgcttatttatcggatgaaatccgataaataagaagcatcaaag

SEQ ID NO: 1962 - DNA, 107 bp, Artificial Sequence
  scaffold variant
ctggcgcttttatcctcattactttgagagccatcaccagcgactatgtcgtatgggtaaagcgcttatttatcggagagaaatccgataaataagaagcatcaaag

SEQ ID NO: 1963 - DNA, 110 bp, Artificial Sequence
  scaffold variant
tactggcgcttttatctcgattactttgagagccatcaccagcgactatgtcgtatgggtaaagcgcttatttatcggagagaaatgccgataaataagaagcatcaaag

SEQ ID NO: 1964 - DNA, 107 bp, Artificial Sequence; identical to SEQ ID NO: 972
  scaffold variant

SEQ ID NO: 1965 - DNA, 109 bp, Artificial Sequence; identical to SEQ ID NO: 1121
  scaffold variant

SEQ ID NO: 1966 - DNA, 109 bp, Artificial Sequence; identical to SEQ ID NO: 941
  scaffold variant

SEQ ID NO: 1967 - DNA, 107 bp, Artificial Sequence; identical to SEQ ID NO: 1337
  scaffold variant

SEQ ID NO: 1968 - DNA, 109 bp, Artificial Sequence; identical to SEQ ID NO: 1177
  scaffold variant

SEQ ID NO: 1969 - DNA, 108 bp, Artificial Sequence
  scaffold variant
tactggcgcttttatctctattactttgagagccatcaccagcgactatgtcgtatgggtaaagcgcttatttatcggaggaaatccgataaataagaagcatcaaag

SEQ ID NO: 1970 - DNA, 107 bp, Artificial Sequence
  scaffold variant
tactggcgcttttatctcattactttgagagccatcaccagcgactatgtcgtatgggtaaagcgcttatttatcggagacaatccgataaataagaagcatcaaag

SEQ ID NO: 1971 - DNA, 109 bp, Artificial Sequence; identical to SEQ ID NO: 518
  scaffold variant

SEQ ID NO: 1972 - DNA, 108 bp, Artificial Sequence
  scaffold variant
tactggcgcttttatcttcattactttgagagccatcaccagcgactatgtcgtatgggtaaagcgcttatttatcggagagaaaacgataaataagaagcatcaaag

SEQ ID NO: 1973 - DNA, 109 bp, Artificial Sequence
  scaffold variant
tactggcgcttttatcttattactttgagagccatcaccagcgactatgtcgtatgggtaaagcgcttatttatgcggagagaaatccgataaataagaagcatcaaag

SEQ ID NO: 1974 - DNA, 107 bp, Artificial Sequence
  scaffold variant
atggcgcttttatctcattactttgagagccatcaccagcgactatgtcgtatgggtaaagcgcttatttatcggagagaaatgccgataaataagaagcatcaaag

SEQ ID NO: 1975 - DNA, 107 bp, Artificial Sequence
  scaffold variant
tactggcgcttttatctaattactttgagagccatcaccagcgactatgtcgtatgggtaaagcgcttatttatcgagagaaatccgataaataagaagcatcaaag

SEQ ID NO: 1976 - DNA, 110 bp, Artificial Sequence
  scaffold variant
tactggcgcttttatctcattactttgagagccatcaccagcgactatgtcgtatgggtaaagcgcttatttatcgggagagaaatccgataaataagaaagcatcaaag

SEQ ID NO: 1977 - DNA, 107 bp, Artificial Sequence; identical to SEQ ID NO: 1678
  scaffold variant

SEQ ID NO: 1978 - DNA, 108 bp, Artificial Sequence
  scaffold variant
cctggcgcttttatcatcattactttgagagccatcaccagcgactatgtcgtatgggtaaagcgcttatttatcggagagaaatccgataaataagaagcatcaaag

SEQ ID NO: 1979 - DNA, 109 bp, Artificial Sequence; identical to SEQ ID NO: 518
  scaffold variant

SEQ ID NO: 1980 - DNA, 108 bp, Artificial Sequence
  scaffold variant
ttactggcgcttttatctcattactttgagagccatcaccagcgactatgtcgtatgggtaaagcgcttatttatcgtgagaaatccgataaataagaagcatcaaag

SEQ ID NO: 1981 - DNA, 110 bp, Artificial Sequence
  scaffold variant
tactggcgcttttatctcgattactttgagagccatcaccagcgactatgtcgtatgggtaaagcgcttatttaatcggagagaaatccgataaataagaagcatcaaag

SEQ ID NO: 1982 - DNA, 109 bp, Artificial Sequence; identical to SEQ ID NO: 1048
  scaffold variant

SEQ ID NO: 1983 - DNA, 105 bp, Artificial Sequence; identical to SEQ ID NO: 379
  scaffold variant

SEQ ID NO: 1984 - DNA, 105 bp, Artificial Sequence; identical to SEQ ID NO: 959
  scaffold variant

SEQ ID NO: 1985 - DNA, 107 bp, Artificial Sequence; identical to SEQ ID NO: 915
  scaffold variant

SEQ ID NO: 1986 - DNA, 107 bp, Artificial Sequence; identical to SEQ ID NO: 972
  scaffold variant

SEQ ID NO: 1987 - DNA, 108 bp, Artificial Sequence
  scaffold variant
tactggcgcttttatctcattactttgagagccatcaccagcgactatgtcgtatgggtaaagcgcttatttatccggagagaatccgataaataagaagcatcaaag

SEQ ID NO: 1988 - DNA, 108 bp, Artificial Sequence
  scaffold variant
tactggcgcttttattcattactttgagagccatcaccagcgactatgtcgtatgggtaaagcgcttatttatcggagagaaatcgcgataaataagaagcatcaaag

SEQ ID NO: 1989 - DNA, 109 bp, Artificial Sequence; identical to SEQ ID NO: 1183
  scaffold variant

SEQ ID NO: 1990 - DNA, 107 bp, Artificial Sequence; identical to SEQ ID NO: 1915
  scaffold variant

SEQ ID NO: 1991 - DNA, 108 bp, Artificial Sequence
  scaffold variant
tactggcgcttttatctcattactttgagagccatcaccagcgactatgtcgtatgggtaaagcgcttatttatcggagagaaatacgataaataagaagcatcaaag

SEQ ID NO: 1992 - DNA, 107 bp, Artificial Sequence; identical to SEQ ID NO: 990
  scaffold variant

SEQ ID NO: 1993 - DNA, 107 bp, Artificial Sequence; identical to SEQ ID NO: 915
  scaffold variant

SEQ ID NO: 1994 - DNA, 106 bp, Artificial Sequence; identical to SEQ ID NO: 1784
  scaffold variant

SEQ ID NO: 1995 - DNA, 103 bp, Artificial Sequence
  scaffold variant
ggcgcttttatctcattactttgagagccatcaccagcgactatgtcgtatgggtaaagcgcttatttatcaagagaaatccgataaataagaagcatcaaag

SEQ ID NO: 1996 - DNA, 108 bp, Artificial Sequence
  scaffold variant
tactggcgcttttatcctcattactttgagagccatcaccagcgactatgtcgtatgggtaaagcgcttatttatcggagagaatccgataaataagaagcatcaaag

SEQ ID NO: 1997 - DNA, 109 bp, Artificial Sequence; identical to SEQ ID NO: 910
  scaffold variant

SEQ ID NO: 1998 - DNA, 107 bp, Artificial Sequence; identical to SEQ ID NO: 1218
  scaffold variant

SEQ ID NO: 1999 - DNA, 108 bp, Artificial Sequence
  scaffold variant
tactggcgcttttatctgcattactttgagagccatcaccagcgactatgtcgtatgggtaaagcgcttatttatcgtgagaaatccgataaataagaagcatcaaag

SEQ ID NO: 2000 - DNA, 108 bp, Artificial Sequence
  scaffold variant
tactggcgcttttatctcattactttgagagccatcaccagcgactatgtcgtatgggtaaagcgcttatttatcgagagaaatccgaataaataagaagcatcaaag

SEQ ID NO: 2001 - DNA, 106 bp, Artificial Sequence
  scaffold variant
tactggcgcttttatctcattactttgagagccatcaccagcgactatgtcgtatgggtaaagcggtatttatcggagagaaatccataaataagaagcatcaaag

SEQ ID NO: 2002 - DNA, 107 bp, Artificial Sequence; identical to SEQ ID NO: 990
  scaffold variant

SEQ ID NO: 2003 - DNA, 108 bp, Artificial Sequence
  scaffold variant
tactggcgcttttatctcattactttgagagccatcaccagcgactatgtcgtatgggtaaagcgatatttatcggagagaaatcgcgataaataagaagcatcaaag

SEQ ID NO: 2004 - DNA, 108 bp, Artificial Sequence
  scaffold variant
tactggcgcttttatctcattactttgagagccatcaccagcgactatgtcgtagtgggtaaagcgcttatttatctagagaaatccgataaataagaagcatcaaag

SEQ ID NO: 2005 - DNA, 107 bp, Artificial Sequence; identical to SEQ ID NO: 833
  scaffold variant

SEQ ID NO: 2006 - DNA, 110 bp, Artificial Sequence
  scaffold variant
ttactggcgcttttatctcattactttgagagccatcaccagcgactatgtcgtatgggtaaagcgcttatttatcgcgagagaaatccgataaataagaagcatcaaag

SEQ ID NO: 2007 - DNA, 108 bp, Artificial Sequence
  scaffold variant
tactggcgcttttatctcattactttgagagccatcaccagcgactatgtcgtattgggtaaagcgcttatttatcggagagaaatcgataaataagaagcatcaaag

SEQ ID NO: 2008 - DNA, 110 bp, Artificial Sequence
  scaffold variant
atactggcgcttttatctcattactttgagagccatcaccagcgactatgtcgtatgggtaaagcgcttatttatacggagagaaatccgataaataagaagcatcaaag

SEQ ID NO: 2009 - DNA, 110 bp, Artificial Sequence
  scaffold variant
tacctggcgcttttatctcattactttgagagccatcaccagcgactatgtcgtatgggtaaagcgcttatttactcggagagaaatccgataaataagaagcatcaaag

SEQ ID NO: 2010 - DNA, 106 bp, Artificial Sequence; identical to SEQ ID NO: 491
  scaffold variant

SEQ ID NO: 2011 - DNA, 107 bp, Artificial Sequence; identical to SEQ ID NO: 990
  scaffold variant

SEQ ID NO: 2012 - DNA, 108 bp, Artificial Sequence
  scaffold variant
gctggcgcttttatctcgattactttgagagccatcaccagcgactatgtcgtatgggtaaagcgcttatttatcggagagaaatccgataaataagaagcatcaaag

SEQ ID NO: 2013 - DNA, 107 bp, Artificial Sequence; identical to SEQ ID NO: 1137
  scaffold variant

SEQ ID NO: 2014 - DNA, 109 bp, Artificial Sequence; identical to SEQ ID NO: 1119
  scaffold variant

SEQ ID NO: 2015 - DNA, 104 bp, Artificial Sequence
  scaffold variant
tggcgcttttatctcattactttgagagccatcaccagcgactatgtcgtatgggtaaagcgcttatttatcggagagaaatccgtaaataagaagcatcaaag

SEQ ID NO: 2016 - DNA, 109 bp, Artificial Sequence; identical to SEQ ID NO: 910
  scaffold variant

SEQ ID NO: 2017 - DNA, 109 bp, Artificial Sequence; identical to SEQ ID NO: 740
  scaffold variant

SEQ ID NO: 2018 - DNA, 107 bp, Artificial Sequence
  scaffold variant
tactggcgcttttatctcattactttgagagccatcaccagcgactatgtcgtatgggtaaagcgcttatttatcttgagaaatccgataaataagaagcatcaaag

SEQ ID NO: 2019 - DNA, 110 bp, Artificial Sequence
  scaffold variant
tactggcgcttttatctcattactttgagagccatcaccagcgactatgtcgtagtgggtaaagcgcttatttatcggagagaaatgccgataaataagaagcatcaaag

SEQ ID NO: 2020 - DNA, 108 bp, Artificial Sequence
  scaffold variant
tactggcgcttttatctcattactttgagagccatcaccagcgactatgtcgtatgggtaaagcgcttatttatcgggagaaatccgataaataagaaagcatcaaag

SEQ ID NO: 2021 - DNA, 107 bp, Artificial Sequence; identical to SEQ ID NO: 1218
  scaffold variant

SEQ ID NO: 2022 - DNA, 108 bp, Artificial Sequence
  scaffold variant
tactggcgcttttatcttttactttgagagccatcaccagcgactatgtcgtatgggtaaagcgcttatttattcggagagaaatccgataaataagaagcatcaaag

SEQ ID NO: 2023 - DNA, 108 bp, Artificial Sequence
  scaffold variant
tactggcgcttttatctcattactttgagagccatcaccagcgactatgtcgtattgggtaaagcgcttatttatccagagaaatccgataaataagaagcatcaaag

SEQ ID NO: 2024 - DNA, 110 bp, Artificial Sequence
  scaffold variant
tactggcgcttttatcctcattactttgagagccatcaccagcgactatgtcgtatgggtaaagcgcttatttatcgcgagagaaatccgataaataagaagcatcaaag

SEQ ID NO: 2025 - DNA, 107 bp, Artificial Sequence; identical to SEQ ID NO: 1337
  scaffold variant

SEQ ID NO: 2026 - DNA, 110 bp, Artificial Sequence
  scaffold variant
tactggcgcttttatcctcattactttgagagccatcaccagcgactatgtcgtatgggtaaagcgcttatttatcggagagaaatcctgataaataagaagcatcaaag

SEQ ID NO: 2027 - DNA, 106 bp, Artificial Sequence; identical to SEQ ID NO: 737
  scaffold variant

SEQ ID NO: 2028 - DNA, 107 bp, Artificial Sequence
  scaffold variant
cctggcgcttttatctcattactttgagagccatcaccagcgactatgtcgtatgggtaaagcgcttatttatcggagaggaatccgataaataagaagcatcaaag

SEQ ID NO: 2029 - DNA, 107 bp, Artificial Sequence; identical to SEQ ID NO: 1337
  scaffold variant

SEQ ID NO: 2030 - DNA, 108 bp, Artificial Sequence
  scaffold variant
tactggcgcttttatctcattactttgagagccatcaccagcgactatgtcgtatgggtaaagcggtatttatcggagagaaatgccgataaataagaagcatcaaag

SEQ ID NO: 2031 - DNA, 109 bp, Artificial Sequence; identical to SEQ ID NO: 910
  scaffold variant

SEQ ID NO: 2032 - DNA, 107 bp, Artificial Sequence; identical to SEQ ID NO: 833
  scaffold variant

SEQ ID NO: 2033 - DNA, 109 bp, Artificial Sequence
  scaffold variant
tactggcgcttttattctcattactttgagagccatcaccagcgactatgtcgtatgggtaaagcgcttatttctcggagagaaatccgataaataagaagcatcaaag

SEQ ID NO: 2034 - DNA, 109 bp, Artificial Sequence; identical to SEQ ID NO: 912
  scaffold variant

SEQ ID NO: 2035 - DNA, 107 bp, Artificial Sequence
  scaffold variant
tactggcgcttttatctcattactttgagagccatcaccagcgactatgtcgtatgggtaaagcgcttatttatcggatgaaatccgataaataagaagcatcaaag

SEQ ID NO: 2036 - DNA, 107 bp, Artificial Sequence; identical to SEQ ID NO: 1707
  scaffold variant

SEQ ID NO: 2037 - DNA, 109 bp, Artificial Sequence; identical to SEQ ID NO: 912
  scaffold variant

SEQ ID NO: 2038 - DNA, 107 bp, Artificial Sequence; identical to SEQ ID NO: 990
  scaffold variant

SEQ ID NO: 2039 - DNA, 107 bp, Artificial Sequence
  scaffold variant
actggcgcttttatctcattactttgagagccatcaccagcgactatgtcgtatgggtaaagcgcttatttatcggagagaaattcgataaataagaagcatcaaag

SEQ ID NO: 2040 - DNA, 108 bp, Artificial Sequence
  scaffold variant
atactggcgcttttatctcattactttgagagccatcaccagcgactatgtcgtatgggtaaagcgcttatttatcgcgagaaatccgataaataagaagcatcaaag

SEQ ID NO: 2041 - DNA, 108 bp, Artificial Sequence; identical to SEQ ID NO: 486
  scaffold variant

SEQ ID NO: 2042 - DNA, 108 bp, Artificial Sequence
  scaffold variant
tactggcgcttttatctcattactttgagagccatcaccagcgactatgtcgtatgggtaaagcgcttatttatgcggagagaaatccgatagtaagaagcatcaaag

SEQ ID NO: 2043 - DNA, 109 bp, Artificial Sequence; identical to SEQ ID NO: 1183
  scaffold variant

SEQ ID NO: 2044 - DNA, 110 bp, Artificial Sequence
  scaffold variant
tactggcgcttttatctcgattactttgagagccatcaccagcgactatgtcgtatgggtaaagcgcttatttatcggagagaaatcccgataaataagaagcatcaaag

SEQ ID NO: 2045 - DNA, 109 bp, Artificial Sequence; identical to SEQ ID NO: 1196
  scaffold variant

SEQ ID NO: 2046 - DNA, 107 bp, Artificial Sequence; identical to SEQ ID NO: 1915
  scaffold variant

SEQ ID NO: 2047 - DNA, 107 bp, Artificial Sequence
  scaffold variant
tactggcccttttatctcattactttgagagccatcaccagcgactatgtcgtatgggtaaagcgcttatttatcgagagaaatccgataaataagaagcatcaaag

SEQ ID NO: 2048 - DNA, 105 bp, Artificial Sequence
  scaffold variant
actggcgcttttatctcattactttgagagccatcaccagcgactatgtcgtatgggtaaagcgcttatttatcggagatatccgataaataagaagcatcaaag

SEQ ID NO: 2049 - DNA, 107 bp, Artificial Sequence; identical to SEQ ID NO: 1707
  scaffold variant

SEQ ID NO: 2050 - DNA, 108 bp, Artificial Sequence
  scaffold variant
tactggcgcttttatcctcattactttgagagccatcaccagcgactatgtcgtatgggtaaagcgcttatttatcggagagaaaccgataaataagaagcatcaaag

SEQ ID NO: 2051 - DNA, 107 bp, Artificial Sequence; identical to SEQ ID NO: 1915
  scaffold variant

SEQ ID NO: 2052 - DNA, 108 bp, Artificial Sequence
  scaffold variant
actggcgcttttatctcattactttgagagccatcaccagcgactatgtcgtatgggtaaagcgcttatttatcggagagaatatccgataaataagaagcatcaaag

SEQ ID NO: 2053 - DNA, 107 bp, Artificial Sequence; identical to SEQ ID NO: 1915
  scaffold variant

SEQ ID NO: 2054 - DNA, 107 bp, Artificial Sequence; identical to SEQ ID NO: 833
  scaffold variant

SEQ ID NO: 2055 - DNA, 107 bp, Artificial Sequence
  scaffold variant
tactggcgcttttatctcattactttgagagccatcaccagcgactatgtcgtatgggtaaagcgcttatttatcggagagaaatagataaataagaagcatcaaag

SEQ ID NO: 2056 - DNA, 107 bp, Artificial Sequence; identical to SEQ ID NO: 1091
  scaffold variant

SEQ ID NO: 2057 - DNA, 109 bp, Artificial Sequence; identical to SEQ ID NO: 1010
  scaffold variant

SEQ ID NO: 2058 - DNA, 108 bp, Artificial Sequence
  scaffold variant
tactggcgcttttatctcattactttgagagccatcaccagcgactatgtcgtatgggtaaagcgcttattttcggagagaaatcgcgataaataagaagcatcaaag

SEQ ID NO: 2059 - DNA, 106 bp, Artificial Sequence; identical to SEQ ID NO: 1784
  scaffold variant

SEQ ID NO: 2060 - DNA, 106 bp, Artificial Sequence; identical to SEQ ID NO: 487
  scaffold variant

SEQ ID NO: 2061 - DNA, 109 bp, Artificial Sequence; identical to SEQ ID NO: 1010
  scaffold variant

SEQ ID NO: 2062 - DNA, 107 bp, Artificial Sequence; identical to SEQ ID NO: 1915
  scaffold variant

SEQ ID NO: 2063 - DNA, 107 bp, Artificial Sequence; identical to SEQ ID NO: 1091
  scaffold variant

SEQ ID NO: 2064 - DNA, 107 bp, Artificial Sequence; identical to SEQ ID NO: 833
  scaffold variant

SEQ ID NO: 2065 - DNA, 107 bp, Artificial Sequence; identical to SEQ ID NO: 1691
  scaffold variant

SEQ ID NO: 2066 - DNA, 107 bp, Artificial Sequence; identical to SEQ ID NO: 1927
  scaffold variant

SEQ ID NO: 2067 - DNA, 109 bp, Artificial Sequence; identical to SEQ ID NO: 837
  scaffold variant

SEQ ID NO: 2068 - DNA, 109 bp, Artificial Sequence; identical to SEQ ID NO: 1555
  scaffold variant

SEQ ID NO: 2069 - DNA, 109 bp, Artificial Sequence; identical to SEQ ID NO: 740
  scaffold variant

SEQ ID NO: 2070 - DNA, 109 bp, Artificial Sequence; identical to SEQ ID NO: 740
  scaffold variant

SEQ ID NO: 2071 - DNA, 108 bp, Artificial Sequence
  scaffold variant
tactggcgcttttatctcattactttgagagccatcaccagcgactatgtcgtattgggtaaagcgcttatttatctagagaaatccgataaataagaagcatcaaag

SEQ ID NO: 2072 - DNA, 107 bp, Artificial Sequence; identical to SEQ ID NO: 1262
  scaffold variant

SEQ ID NO: 2073 - DNA, 109 bp, Artificial Sequence
  scaffold variant
tactggcgcttttatctcattactttgagagccatcaccagcgactatgtcgtatgggtaaagcgcttattctatcggagagaaatccgataaataagaagcatcaaag

SEQ ID NO: 2074 - DNA, 109 bp, Artificial Sequence; identical to SEQ ID NO: 1177
  scaffold variant

SEQ ID NO: 2075 - DNA, 107 bp, Artificial Sequence; identical to SEQ ID NO: 1218
  scaffold variant

SEQ ID NO: 2076 - DNA, 106 bp, Artificial Sequence; identical to SEQ ID NO: 737
  scaffold variant

SEQ ID NO: 2077 - DNA, 110 bp, Artificial Sequence
  scaffold variant
ttactggcgcttttatctcattactttgagagccatcaccagcgactatgtcgtatgggtaaagcgcttatttattcggagagaaatccgataaataagaagcatcaaag

SEQ ID NO: 2078 - DNA, 110 bp, Artificial Sequence
  scaffold variant
ctactggcgcttttatctcattactttgagagccatcaccagcgactatgtcgtatgggtaaagcgcttatttatcggagagaaatcgcgataaataagaagcatcaaag

SEQ ID NO: 2079 - DNA, 107 bp, Artificial Sequence; identical to SEQ ID NO: 972
  scaffold variant

SEQ ID NO: 2080 - DNA, 110 bp, Artificial Sequence
  scaffold variant
tactggcgcttttatctcattactttgagagccatcaccagcgactatgtcgtattgggtaaagcgcttatttatcgggagagaaatccgataaataagaagcatcaaag

SEQ ID NO: 2081 - DNA, 109 bp, Artificial Sequence; identical to SEQ ID NO: 941
  scaffold variant

SEQ ID NO: 2082 - DNA, 108 bp, Artificial Sequence
  scaffold variant
ctactggcgcttttatctcattactttgagagccatcaccagcgactatgtcgtatgggtaaagcgcttatttatcggaagaaatccgataaataagaagcatcaaag

SEQ ID NO: 2083 - DNA, 109 bp, Artificial Sequence; identical to SEQ ID NO: 941
  scaffold variant

SEQ ID NO: 2084 - DNA, 106 bp, Artificial Sequence; identical to SEQ ID NO: 737
  scaffold variant

SEQ ID NO: 2085 - DNA, 107 bp, Artificial Sequence; identical to SEQ ID NO: 1915
  scaffold variant

SEQ ID NO: 2086 - DNA, 107 bp, Artificial Sequence; identical to SEQ ID NO: 1678
  scaffold variant

SEQ ID NO: 2087 - DNA, 107 bp, Artificial Sequence
  scaffold variant
actggcgcttttatctcattactttgagagccatcaccagcgactatgtcgtatgggtaaagcgcttatttagcggagagaaatccgataaataagaagcatcaaag

SEQ ID NO: 2088 - DNA, 107 bp, Artificial Sequence; identical to SEQ ID NO: 833
  scaffold variant

SEQ ID NO: 2089 - DNA, 107 bp, Artificial Sequence; identical to SEQ ID NO: 972
  scaffold variant

SEQ ID NO: 2090 - DNA, 107 bp, Artificial Sequence; identical to SEQ ID NO: 972
  scaffold variant

SEQ ID NO: 2091 - DNA, 108 bp, Artificial Sequence
  scaffold variant
gatggcgcttttatctcattactttgagagccatcaccagcgactatgtcgtatgggtaaagcgcttatttagtcggagagaaatccgataaataagaagcatcaaag

SEQ ID NO: 2092 - DNA, 107 bp, Artificial Sequence
  scaffold variant
actggcgcttttatctcattactttgagagccatcaccagcgactatgtcgtatgggtaaagcgcttatttgtcggagagaaatccgataaataagaagcatcaaag

SEQ ID NO: 2093 - DNA, 107 bp, Artificial Sequence; identical to SEQ ID NO: 1337
  scaffold variant

SEQ ID NO: 2094 - DNA, 107 bp, Artificial Sequence; identical to SEQ ID NO: 1915
  scaffold variant

SEQ ID NO: 2095 - DNA, 108 bp, Artificial Sequence
  scaffold variant
tactggcgcttttattctcattactttgagagccatcaccagcgactatgtcgtatgggtaaagctttatttatcggagagaaatccgataaataagaagcatcaaag

SEQ ID NO: 2096 - DNA, 108 bp, Artificial Sequence
  scaffold variant
tactggcgcttttatctcattactttgagagccatcaccagcgactatgtcgtatgggtaaagcgcttattttatcggagagaaatcgataaataagaagcatcaaag

SEQ ID NO: 2097 - DNA, 109 bp, Artificial Sequence; identical to SEQ ID NO: 1119
  scaffold variant

SEQ ID NO: 2098 - DNA, 107 bp, Artificial Sequence; identical to SEQ ID NO: 833
  scaffold variant

SEQ ID NO: 2099 - DNA, 109 bp, Artificial Sequence; identical to SEQ ID NO: 1555
  scaffold variant

SEQ ID NO: 2100 - DNA, 107 bp, Artificial Sequence
  scaffold variant
tacggcgcttttatctcattactttgagagccatcaccagcgactatgtcgtatgggtaaagcgcttatttataggagagaaatccgataaataagaagcatcaaag

SEQ ID NO: 2101 - RNA, 108 nt, Artificial Sequence
  gNA Variant Scaffold
uacuggcgcuuuuaucucauuacuuugagagccaucaccagcgacuaugucguauggguaaagcgcaggugggacgaccucucggucguccuaucugaagcaucaaag

SEQ ID NO: 2102 - RNA, 99 nt, Artificial Sequence
  gNA Variant Scaffold
uacuggcgcuuuuaucucauuacuuugagagccaucaccagcgacuaugucguauggguaaagcgcugcucgacgcguccucgagcagaagcaucaaag

SEQ ID NO: 2103 - RNA, 97 nt, Artificial Sequence
  gNA Variant Scaffold
uacuggcgcuuuuaucucauuacuuugagagccaucaccagcgacuaugucguauggguaaagcgcugcucgcuccguucgagcagaagcaucaaag

SEQ ID NO: 2104 - RNA, 91 nt, Artificial Sequence
  gNA Variant Scaffold
guacuggcgcuuuuaucucauuacuuugagagccaucaccagcgacuaugucguauggguaaagcgcccucuucggagggaagcaucaaag

SEQ ID NO: 2105 - RNA, 99 nt, Artificial Sequence
  gNA Variant Scaffold
uacuggcgcuuuuaucucauuacuuugagagccaucaccagcgacuaugucguauggguaaagcgcaggaguuucuauggaaacccugaagcaucaaag

SEQ ID NO: 2106 - RNA, 99 nt, Artificial Sequence
  gNA Variant Scaffold
guacuggcgccuuuaucucauuacuuugagagccaucaccagcgacuaugucguauggguaaagcgcuuacggacuucgguccguaagaagcaucaaag

SEQ ID NO: 2107 - RNA, 90 nt, Artificial Sequence
  gNA Variant Scaffold
uacuggcgcuuuuaucucauuacuuugagagccaucaccagcgacuaugucguauggguaaagcgcugcgcuugcgcagaagcaucaaag

SEQ ID NO: 2108 - RNA, 108 nt, Artificial Sequence
  gNA Variant Scaffold
uacuggcgcuuuuaucugauuacuuugagagccaucaccagcgacuaugucguauggguaaagcgcuuauuuaucggagagaaauccgauaaauaagaagcaucaaag

SEQ ID NO: 2109 - RNA, 108 nt, Artificial Sequence
  gNA Variant Scaffold
uacuggcgcuuuuaucgcauuacuuugagagccaucaccagcgacuaugucguauggguaaagcgcuuauuuaucggagagaaauccgauaaauaagaagcaucaaag

SEQ ID NO: 2110 - RNA, 110 nt, Artificial Sequence
  gNA Variant Scaffold
uacuggcgcuuuuaucucauuacuuugagagccaucaccagcgacuaugucguauggguaaagcgcuuauuuaucggagacuucgguccgauaaauaagaagcaucaaag

SEQ ID NO: 2111 - RNA, 97 nt, Artificial Sequence
  gNA Variant Scaffold
uacuggcgcuuuuaucucauuacuuugagagccaucaccagcgacuaugucguauggguaaagcgcacaugaggauuacccaugugaagcaucaaag

SEQ ID NO: 2112 - RNA, 106 nt, Artificial Sequence
  gNA Variant Scaffold
gcuggcgcuuuuaucucauuacuuugagagccaucaccagcgacuaugucguauggguaaagcgcuuauuuaucgugagaaauccgauaaauaagaagcaucaaag

SEQ ID NO: 2113 - RNA, 96 nt, Artificial Sequence
  gNA Variant Scaffold
uacuggcgcuuuuaucucauuacuuugagagccaucaccagcgacuaugucguauggguaaagcgcugcaugucuaagacagcagaagcaucaaag

SEQ ID NO: 2114 - RNA, 90 nt, Artificial Sequence
  gNA Variant Scaffold
uacuggcgcuuuuaucucauuacuuugagagccaucaccagcgacuaugucguauggguaaagcgcagggcuucggccgaagcaucaaag

SEQ ID NO: 2115 - RNA, 98 nt, Artificial Sequence
  gNA Variant Scaffold
uacuggcgcuuuuaucucauuacuuugagagccaucaccagcgacuaugucguauggguaaagcgcaauccauugcacuccggauugaagcaucaaag

SEQ ID NO: 2116 - RNA, 108 nt, Artificial Sequence
  gNA Variant Scaffold
uacuggcgcuuuucucgcauuacuuugagagccaucaccagcgacuaugucguauggguaaagcgcuuauuuaucggagagaaauccgauaaauaagaagcaucaaag

SEQ ID NO: 2117 - RNA, 108 nt, Artificial Sequence
  gNA Variant Scaffold
uacuggcgcuuuuaucucauuacuuugagagccaucaccagcgacuaugucguauggguaaagcgcuuauuuaucggacuucgguccgauaaauaagaagcaucaaag

SEQ ID NO: 2118 - RNA, 100 nt, Artificial Sequence
  gNA Variant Scaffold
uacuggcgcuuuuaucucauuacuuugagagccaucaccagcgacuaugucguauggguaaagcgcugcucguuugcggcuacgagcagaagcaucaaag

SEQ ID NO: 2119 - RNA, 100 nt, Artificial Sequence
  gNA Variant Scaffold
uacuggcgcuuuuaucucauuacuuugagagccaucaccagcgacuaugucguauggguaaagcgcuuauuuaucgagagauaaauaagaagcaucaaag

SEQ ID NO: 2120 - RNA, 107 nt, Artificial Sequence
  gNA Variant Scaffold
uacggcgcuuuuaucucauuacuuugagagccaucaccagcgacuaugucguauggguaaagcgcuuauuuaucggagagaaauccgauaaauaagaagcaucaaag

SEQ ID NO: 2121 - RNA, 99 nt, Artificial Sequence
  gNA Variant Scaffold
uacuggcgccuuuuaucucauuacuuugagagccaucaccagcgacuaugucguauggguaaagcgcuuacggacuucgguccguaagaagcaucaaag

SEQ ID NO: 2122 - RNA, 108 nt, Artificial Sequence
  gNA Variant Scaffold
uacuggcgcuuuuaucucauuacuuugagagccaucaccagcgacuaugucguaucgguaaagcgcuuauuuaucggagagaaauccgauaaauaagaagcaucaaag

SEQ ID NO: 2123 - RNA, 108 nt, Artificial Sequence
  gNA Variant Scaffold
uacuggcgccuuuaucucauuacuuugagagccaucaccagcgacuaugucguauggguaaagcgcuuauuuaucggacuucgguccgauaaauaagaagcaucaaag

SEQ ID NO: 2124 - RNA, 105 nt, Artificial Sequence
  gNA Variant Scaffold
uacuggcgcuuuuaucucauuacuuugagagccaucaccagcgacuaugucguauggguaaagcgcuuauuuaucgagaaauccgauaaauaagaagcaucaaag

SEQ ID NO: 2125 - RNA, 103 nt, Artificial Sequence
  gNA Variant Scaffold
gcgcuuuuaucucauuacuuugagagccaucaccagcgacuaugucguauggguaaagcgcuuauuuaucggagagaaauccgauaaauaagaagcaucaaag

SEQ ID NO: 2126 - RNA, 103 nt, Artificial Sequence
  gNA Variant Scaffold
uacuggcgcuuuuaucucauuacuuugagagccaucaccagcgacuaugucguauggguaaagcgcuuauuuaucggagagagauaaauaagaagcaucaaag

SEQ ID NO: 2127 - RNA, 108 nt, Artificial Sequence
  gNA Variant Scaffold
uacuggcgcuuuuaucucauuacuuuggagagccaucaccagcgacuaugucguauggguaaagcgcuuauuuaucggagaguauccgauaaauaagaagcaucaaag

SEQ ID NO: 2128 - RNA, 109 nt, Artificial Sequence
  gNA Variant Scaffold
uacuggcgcuuuuaucucauuacuuugagagccaucaccagcgacuauguucguauggguaaagcgcuuauuuaucggagagaaauccgauaaauaagaagcaucaaag

SEQ ID NO: 2129 - RNA, 105 nt, Artificial Sequence
  gNA Variant Scaffold
agcgcuuuuaucucauuacuuugagagccaucaccagcgacuaugucguauggguaaagcgcuuauuuaucggagagaaaugccgauaaauaagaagcaucaaag

SEQ ID NO: 2130 - RNA, 109 nt, Artificial Sequence
  gNA Variant Scaffold
uacuggcgcuuuuaucucauuacuuugagagccaucaccagcgacuaugucguauggguaaagcgcuuauuuaucggagagaaauccgauaaaauaagaagcaucaaag

SEQ ID NO: 2131 - RNA, 109 nt, Artificial Sequence
  gNA Variant Scaffold
uacuggcgcuuuuaucucauuacuuugagagccaucaccagcgacuaugucguauggguaaagcgcuuauuguaucggagagaaauccgauaaauaagaagcaucaaag

SEQ ID NO: 2132 - RNA, 102 nt, Artificial Sequence
  gNA Variant Scaffold
gcgcuuuuaucucauuacuuugagagccaucaccagcgacuaugucguauggguaaagcgcuuauuuaucggacuucgguccgauaaauaagcgcaucaaag

SEQ ID NO: 2133 - RNA, 108 nt, Artificial Sequence
  gNA Variant Scaffold
uacuggcgcuuuucucucauuacuuugagagccaucaccagcgacuaugucguauggguaaagcgcuuauuuaucggagagaaauccgauaaauaagaagcaucaaag

SEQ ID NO: 2134 - RNA, 106 nt, Artificial Sequence
  gNA Variant Scaffold
guggcgcuuuuaucucauuacuuugagagccaucaccagcgacuaugucguauggguaaagcgcuuauuuaucggagagaaauccgauaaauaagaagcaucaaag

SEQ ID NO: 2135 - RNA, 110 nt, Artificial Sequence
  gNA Variant Scaffold
uacuggcgcuuuuaucucauuacuuugagagccaucaccagcgaccuuaugucguauggguaaagcgcuuauuuaucggagagaaauccgauaaauaagaagcaucaaag

SEQ ID NO: 2136 - RNA, 107 nt, Artificial Sequence
  gNA Variant Scaffold
gauggcgcuuuuaucucauuacuuugagagccaucaccagcgacuaugucguauggguaaagcgcuuauuuaucggacuucgguccgauaaauaagaagcaucaaag

SEQ ID NO: 2137 - RNA, 106 nt, Artificial Sequence
  gNA Variant Scaffold
uacuggcgcuuuuaucucauuacuuugagagccaucaccagcgacuaugucguauggguaaagcgcuuauuuaucggagagaaauccgauaaaagaagcaucaaag

SEQ ID NO: 2138 - RNA, 109 nt, Artificial Sequence
  gNA Variant Scaffold
uacuggcgcuuuuaucucauuacuuugagagccaucaccagcgaucuaugucguauggguaaagcgcuuauuuaucggagagaaauccgauaaauaagaagcaucaaag

SEQ ID NO: 2139 - RNA, 106 nt, Artificial Sequence
  gNA Variant Scaffold
uacuggcgcuuuuaucucauuacuuugagagccaucaccagcgacuaugucguauggguaaaggcuuauuuaucggagagaaauccgauaaaaagaagcaucaaag

SEQ ID NO: 2140 - RNA, 107 nt, Artificial Sequence
  gNA Variant Scaffold
uacuggcgcuuuuaucucauuacuuugagagccaucaccagcgacuaugucguauggguaaagcgcuuauuuaucggagagaaauccgauaaaaagaagcaucaaag

SEQ ID NO: 2141 - RNA, 107 nt, Artificial Sequence
  gNA Variant Scaffold
uacuggcgcuuuaucucauuacuuugagagccaucaccagcgacuaugucguauggguaaagcgcuuauuuaucggacuucgguccgauaaauaagaagcaucaaag

SEQ ID NO: 2142 - RNA, 98 nt, Artificial Sequence
  gNA Variant Scaffold
cggcgcuuuucucgcauuacuuugagagccaucaccagcgacuaugucguauggguaaagcgcuuauuguaucgagagauaaauaagaagcaucaaag

SEQ ID NO: 2143 - RNA, 107 nt, Artificial Sequence
  gNA Variant Scaffold
cacuggcgcuuuuaucucauuacuuugagagccaucaccagcgacuaugucguauggguaaagcgcuuauuuucggagagaaauccgauaaauaagaagcaucaaag

SEQ ID NO: 2144 - RNA, 106 nt, Artificial Sequence
  gNA Variant Scaffold
uacuggcgcuuuaucucauuacuuugagagccaucaccagcgacuucggucguauggguaaagcgcuuauguaucggcuucggccgauacauaagaagcaucaaag

SEQ ID NO: 2145 - RNA, 107 nt, Artificial Sequence
  gNA Variant Scaffold
uacuggcgcuuuuaucucauuacuuugagagccaucaccagcgacuucggucguauggguaaagcgcuuauguaucggcuucggccgauacauaagaagcaucaaag

SEQ ID NO: 2146 - RNA, 109 nt, Artificial Sequence
  gNA Variant Scaffold
uacuggcgcuuuuaucucauuacuuugagagccaucaccagcgacuaugucguaugggugaaagcgcuuauuuaucggagagaaauccgauaaauaagaagcaucaaag

SEQ ID NO: 2147 - RNA, 64 nt, Artificial Sequence
  gNA Variant Scaffold
uacuggcgcuuuuaucucauuacuuugagagccaucaccagcgacuucggucguauggguaaag

SEQ ID NO: 2148 - RNA, 62 nt, Artificial Sequence
  gNA Variant Scaffold
gaugggcuuuuaucucauuacuuugagagccaucaccagcgacuucggucguauggguaaag

SEQ ID NO: 2149 - RNA, 105 nt, Artificial Sequence
  gNA Variant Scaffold
gaugggcuuuuaucucauuacuuugagagccaucaccagcgacuucggucguauggguaaagcgcuuauuuaucggcuucggccgauaaauaagaagcaucaaag

SEQ ID NO: 2150 - RNA, 156 nt, Artificial Sequence
  gNA Variant Scaffold
uacuggcgcuuuuaucucauuacuuugagagccaucaccagcgacuaugucguauggguaaagcgcuacacugggaucgcugaauuagagaucggcguccuuucauucuauauacuuuggaguuuuaaaaugucucuaaguacagaagcaucaaag

SEQ ID NO: 2151 - RNA, 103 nt, Artificial Sequence
  gNA Variant Scaffold
ggcgcuuuuaucucauuacuuugagagccaucaccagcgacuucggucguauggguaaagcgcuuauuuaucggcuucggccgauaaauaagaagcaucaaag

SEQ ID NO: 2152 - RNA, 106 nt, Artificial Sequence
  gNA Variant Scaffold
gcuggcgcuuuuaucucauuacuuugagagccaucaccagcgacuucggucguauggguaaagcgcuuauuuaucggcuucggccgauaaauaagaagcaucaaag

SEQ ID NO: 2153 - RNA, 109 nt, Artificial Sequence
  gNA Variant Scaffold
uacuggcgcuuuuaucucauuacuuugagagccaucaccagcgacuucggucguauggguaaagcgcuuauuuaucggagagaaauccgauaaauaagaagcaucaaag

SEQ ID NO: 2154 - RNA, 112 nt, Artificial Sequence
  gNA Variant Scaffold
uacuggcgcuuuuaucucauuacuuugagagccaugcuccaccagcgacuaugucguauggguaaagcgcuuauuuaucggagagaaauccgauaaauaagaagcaucaaag

SEQ ID NO: 2155 - RNA, 97 nt, Artificial Sequence
  gNA Variant Scaffold
uacuggcgcuuuuaucucauuacuuugagagccaucaccagcgacuaugucguauggguaaagcgggguuaggguuaggguuagggaagcaucaaag

SEQ ID NO: 2156 - RNA, 96 nt, Artificial Sequence
  gNA Variant Scaffold
uacuggcgcuuuuaucucauuacuuugagagccaucaccagcgacuaugucguauggguaaagcggagggagggagggagagggaaagcaucaaag

SEQ ID NO: 2157 - RNA, 101 nt, Artificial Sequence
  gNA Variant Scaffold
uacuggcgcuuuuaucucauuacuuugagagccaucaccagcgacuaugucguauggguaaagcguuggguuaggguuaggguuagggaaaagcaucaaag

SEQ ID NO: 2158 - RNA, 91 nt, Artificial Sequence
  gNA Variant Scaffold
uacuggcgcuuuuaucucauuacuuugagagccaucaccagcgacuaugucguauggguaaagcgcagggcuucggccggaagcaucaaag

SEQ ID NO: 2159 - RNA, 103 nt, Artificial Sequence
  gNA Variant Scaffold
uacuggcgcuuuuaucucauuacuuugagagccaucaccagcgacuaugucguauggguaaagcgccugcucaguacgagaggaaccgcaggaagcaucaaag

SEQ ID NO: 2160 - RNA, 90 nt, Artificial Sequence
  gNA Variant Scaffold
uacuggcgcuuuuaucugauuacuuugagagccaucaccagcgacuaugucguauggguaaagcgcccucuucggagggaagcaucaaag

SEQ ID NO: 2161 - RNA, 98 nt, Artificial Sequence
  gNA Variant Scaffold
uacuggcgccuuuaucugauuacuuugagagccaucaccagcgacuaugucguauggguaaagcgcuuacggacuucgguccguaagaagcaucaaag

SEQ ID NO: 2162 - RNA, 98 nt, Artificial Sequence
  gNA Variant Scaffold
uacuggcgcuuuuaucugauuacuuugagagccaucaccagcgacuaugucguauggguaaagcgcggacgaccucucggucguccgaagcaucaaag

SEQ ID NO: 2163 - RNA, 108 nt, Artificial Sequence
  gNA Variant Scaffold
uacuggcgcuuuuaucugauuacuuugagagccaucaccagcgacuaugucguauggguaaagcgcaggugggacgaccucucggucguccuaucugaagcaucaaag

SEQ ID NO: 2164 - RNA, 99 nt, Artificial Sequence
  gNA Variant Scaffold
uacuggcgccuuuaucugcauuacuuugagagccaucaccagcgacuaugucguauggguaaagcgcuuacggacuucgguccguaagaagcaucaaag

SEQ ID NO: 2165 - RNA, 97 nt, Artificial Sequence
  gNA Variant Scaffold
gcuggcgcuuuuaucugauuacuuugagagccaucaccagcgacuaugucguauggguaaagcgcuuacggacuucgguccguaagaagcaucaaag

SEQ ID NO: 2166 - RNA, 108 nt, Artificial Sequence
  gNA Variant Scaffold
uacuggcgccuuuaucugauuacuuugagagccaucaccagcgacuaugucguauggguaaagcgcaggugggacgaccucucggucguccuaucugaagcaucaaag

SEQ ID NO: 2167 - RNA, 98 nt, Artificial Sequence
  gNA Variant Scaffold
uacuggcgccuuuaucugauuacuuugagagccaucaccagcgacuaugucguauggguaaagcgcggacgaccucucggucguccgaagcaucaaag

SEQ ID NO: 2168 - RNA, 90 nt, Artificial Sequence
  gNA Variant Scaffold
uacuggcgccuuuaucucauuacuuugagagccaucaccagcgacuaugucguauggguaaagcgcccucuucggagggaagcaucaaag

SEQ ID NO: 2169 - RNA, 98 nt, Artificial Sequence
  gNA Variant Scaffold
uacuggcgcuuuuaucucauuacuuugagagccaucaccagcgacuaugucguauggguaaagcgcuuacggacuucgguccguaagaagcaucaaag

SEQ ID NO: 2170 - RNA, 99 nt, Artificial Sequence
  gNA Variant Scaffold
uacuggcgccuuuaucaucauuacuuugagagccaucaccagcgacuaugucguauggguaaagcgcuuacggacuucgguccguaagaagcaucaaag

SEQ ID NO: 2171 - RNA, 194 nt, Artificial Sequence
  gNA Variant Scaffold
uacuggcgcuuuuaucucauuacuuugagagccaucaccagcgacuaugucguauggguaaagcgcuuauuuaucggagagaaauccgauaaauaagaagcaucaaagggccggcauggucccagccuccucgcuggcgccggcugggcaacauuccgaggggaccguccccucgguaauggcgaaugggaccc

SEQ ID NO: 2172 - RNA, 108 nt, Artificial Sequence
  gNA Variant Scaffold
uacuggcgccuuuaucucauuacuuugagagccaucaccagcgacuaugucguauggguaaagcgcaggugggacgaccucucggucguccuaucugaagcaucaaag

SEQ ID NO: 2173 - RNA, 106 nt, Artificial Sequence
  gNA Variant Scaffold
uacuggcgcuuuuaucucauuacuuugagagccaucaccagcgacuaugucguauggguaaagcgcuuauuuaucggagaaauccgauaaauaagaagcaucaaag

SEQ ID NO: 2174 - RNA, 98 nt, Artificial Sequence
  gNA Variant Scaffold
uacuggcgccuuuaucucauuacuuugagagccaucaccagcgacuaugucguauggguaaagcgcggacgaccucucggucguccgaagcaucaaag

SEQ ID NO: 2175 - RNA, 92 nt, Artificial Sequence
  gNA Variant Scaffold
uacuggcgcuuuuaucucauuacuuugagagccaucaccagcgacuaugucguauggguaaagcgccggacuucgguccggaagcaucaaag

SEQ ID NO: 2176 - RNA, 108 nt, Artificial Sequence
  gNA Variant Scaffold
uacuggcgcuuuuaucggauuacuuugagagccaucaccagcgacuaugucguauggguaaagcgcuuauuuaucggagagaaauccgauaaauaagaagcaucaaag

SEQ ID NO: 2177 - RNA, 98 nt, Artificial Sequence
  gNA Variant Scaffold
uacuggcgcuuuuaucucauuacuuugagagccaucaccagcgacuaugucguauggguaaagcgcggacgaccucucggucguccgaagcaucaaag

SEQ ID NO: 2178 - RNA, 89 nt, Artificial Sequence
  gNA Variant Scaffold
gcuggcgcuuuuaucugauuacuuugagagccaucaccagcgacuaugucguauggguaaagcgcccucuucggagggaagcaucaaag

SEQ ID NO: 2179 - RNA, 88 nt, Artificial Sequence
  gNA Variant Scaffold
gcuggcgccuuuaucugauuacuuugagagccaucaccagcgacuaugucguauggguaaagcucccucuucggagggagcaucaaag

SEQ ID NO: 2180 - RNA, 197 nt, Artificial Sequence
  gNA Variant Scaffold
uacuggcgcuuuuaucucauuacuuugagagccaucaccagcgacuaugucguauggguaaagcgcuuauuuaucggagagaaauccgauaaauaagaagcaucaaaggggucggcauggcaucuccaccuccucgcgguccgaccugggcauccgaaggaggacgcacguccacucggauggcuaagggagagcca

SEQ ID NO: 2181 - RNA, 88 nt, Artificial Sequence
  gNA Variant Scaffold
gcuggcgccuuuaucugauuacuuugagagccaucaccagcgacuaugucguauggguaaagcgcccucuucggagggcgcaucaaag

SEQ ID NO: 2182 - RNA, 186 nt, Artificial Sequence
  gNA Variant Scaffold
uacuggcgcuuuuaucucauuacuuugagagccaucaccagcgacuaugucguauggguaaagcgcuuauuuaucggagagaaauccgauaaauaagaagcaucaaaguuuuggccggcauggucccagccuccucgcuggcgccggcugggcaacaugcuucggcauggcgaaugggaccccggg

SEQ ID NO: 2183 - RNA, 97 nt, Artificial Sequence
  gNA Variant Scaffold
gauggcgccuuuaucucauuacuuugagagccaucaccagcgacuaugucguauggguaaagcgcuuacggacuucgguccguaagaagcaucaaag

SEQ ID NO: 2184 - RNA, 89 nt, Artificial Sequence
  gNA Variant Scaffold
gcuggcgcuuuuaucucauuacuuugagagccaucaccagcgacuaugucguauggguaaagcgcccucuucggagggaagcaucaaag

SEQ ID NO: 2185 - RNA, 96 nt, Artificial Sequence
  gNA Variant Scaffold
gcuggcgccuuuaucugauuacuuugagagccaucaccagcgacuaugucguauggguaaagcucuuacggacuucgguccguaagagcaucaaag

SEQ ID NO: 2186 - RNA, 96 nt, Artificial Sequence
  gNA Variant Scaffold
gcuggcgccuuuaucugauuacuuugagagccaucaccagcgacuaugucguauggguaaagcucggacgaccucucggucguccgagcaucaaag

SEQ ID NO: 2187 - RNA, 160 nt, Artificial Sequence
  gNA Variant Scaffold
uacuggcgcuuuuaucucauuacuuugagagccaucaccagcgacuaugucguauggguaaagcgcuuauuuaucggagagaaauccgauaaauaagaagcaucaaagccugucaccggaugugcuuuccggucugaugaguccgugaggacgaaacagg

SEQ ID NO: 2188 - RNA, 97 nt, Artificial Sequence
  gNA Variant Scaffold
gcuggcgcuuuuaucugauuacuuugagagccaucaccagcgacuaugucguauggguaaagcgcggacgaccucucggucguccgaagcaucaaag

SEQ ID NO: 2189 - RNA, 97 nt, Artificial Sequence
  gNA Variant Scaffold
gcuggcgccuuuaucugauuacuuugagagccaucaccagcgacuaugucguauggguaaagcgcggacgaccucucggucguccgaagcaucaaag

SEQ ID NO: 2190 - RNA, 106 nt, Artificial Sequence
  gNA Variant Scaffold
gcuggcgccuuuaucugauuacuuugagagccaucaccagcgacuaugucguauggguaaagcucaggugggacgaccucucggucguccuaucugagcaucaaag

SEQ ID NO: 2191 - RNA, 177 nt, Artificial Sequence
  gNA Variant Scaffold
uacuggcgcuuuuaucucauuacuuugagagccaucaccagcgacuaugucguauggguaaagcgcuuauuuaucggagagaaauccgauaaauaagaagcaucaaaggauggccggcauggucccagccuccucgcuggcgccggcugggcaacaccuucggguggcgaaugggac

SEQ ID NO: 2192 - RNA, 107 nt, Artificial Sequence
  gNA Variant Scaffold
gcuggcgcuuuuaucugauuacuuugagagccaucaccagcgacuaugucguauggguaaagcgcaggugggacgaccucucggucguccuaucugaagcaucaaag

SEQ ID NO: 2193 - RNA, 109 nt, Artificial Sequence
  gNA Variant Scaffold
uacuggcgcuuuuaucucauuacuuugagagccaucaccagcgacuaugucguacuggguaaagcgcuuauuuaucggagagaaauccgauaaauaagaagcaucaaag

SEQ ID NO: 2194 - RNA, 107 nt, Artificial Sequence
  gNA Variant Scaffold
uacuggcgcuuuuaucucauuacuuugagagccaucaccagcgacuaugucguauggguaaagcgcuuauuuaucgugagaaauccgauaaauaagaagcaucaaag

SEQ ID NO: 2195 - RNA, 109 nt, Artificial Sequence
  gNA Variant Scaffold
guacuggcgcuuuuaucucauuacuuugagagccaucaccagcgacuaugucguauggguaaagcgcuuauuuaucggagagaaauccgauaaauaagaagcaucaaag

SEQ ID NO: 2196 - RNA, 97 nt, Artificial Sequence
  gNA Variant Scaffold
gcuggcgcuuuuaucucauuacuuugagagccaucaccagcgacuaugucguauggguaaagcgcggacgaccucucggucguccgaagcaucaaag

SEQ ID NO: 2197 - RNA, 97 nt, Artificial Sequence
  gNA Variant Scaffold
gcuggcgccuuuaucugauuacuuugagagccaucaccagcgacuaugucguauggguaaagcgcuuacggacuucgguccguaagaagcaucaaag

SEQ ID NO: 2198 - RNA, 107 nt, Artificial Sequence
  gNA Variant Scaffold
gcuggcgcuuuuaucucauuacuuugagagccaucaccagcgacuaugucguauggguaaagcgcuuauuuaucggagagaaauccgauaaauaagaagcaucaaag

SEQ ID NO: 2199 - RNA, 97 nt, Artificial Sequence
  gNA Variant Scaffold
gcuggcgccuuuaucucauuacuuugagagccaucaccagcgacuaugucguauggguaaagcgcuuacggacuucgguccguaagaagcaucaaag

SEQ ID NO: 2200 - RNA, 89 nt, Artificial Sequence
  gNA Variant Scaffold
gcuggcgccuuuaucugauuacuuugagagccaucaccagcgacuaugucguauggguaaagcgcccucuucggagggaagcaucaaag

SEQ ID NO: 2201 - RNA, 107 nt, Artificial Sequence
  gNA Variant Scaffold
gcuggcgcuuuuaucucauuacuuugagagccaucaccagcgacuaugucguauggguaaagcgcaggugggacgaccucucggucguccuaucugaagcaucaaag

SEQ ID NO: 2202 - RNA, 107 nt, Artificial Sequence
  gNA Variant Scaffold
gcuggcgccuuuaucucauuacuuugagagccaucaccagcgacuaugucguauggguaaagcgcaggugggacgaccucucggucguccuaucugaagcaucaaag

SEQ ID NO: 2203 - RNA, 107 nt, Artificial Sequence
  gNA Variant Scaffold
gcuggcgccuuuaucugauuacuuugagagccaucaccagcgacuaugucguauggguaaagcgcaggugggacgaccucucggucguccuaucugaagcaucaaag

SEQ ID NO: 2204 - RNA, 98 nt, Artificial Sequence
  gNA Variant Scaffold
uacuggcgcuuuuaucugauuacuuugagagccaucaccagcgacuaugucguauggguaaagcgcuuacggacuucgguccguaagaagcaucaaag

SEQ ID NO: 2205 - RNA, 89 nt, Artificial Sequence
  gNA Variant Scaffold
gcuggcgccuuuaucucauuacuuugagagccaucaccagcgacuaugucguauggguaaagcgcccucuucggagggaagcaucaaag

SEQ ID NO: 2206 - RNA, 97 nt, Artificial Sequence
  gNA Variant Scaffold
gcuggcgcuuuuaucucauuacuuugagagccaucaccagcgacuaugucguauggguaaagcgcuuacggacuucgguccguaagaagcaucaaag

SEQ ID NO: 2207 - RNA, 97 nt, Artificial Sequence
  gNA Variant Scaffold
gcuggcgccuuuaucucauuacuuugagagccaucaccagcgacuaugucguauggguaaagcgcggacgaccucucggucguccgaagcaucaaag

SEQ ID NO: 2208 - RNA, 177 nt, Artificial Sequence
  gNA Variant Scaffold
gauggccggcauggucccagccuccucgcuggcgccggcugggcaacaccuucggguggcgaaugggacuacuggcgcuuuuaucucauuacuuugagagccaucaccagcgacuaugucguauggguaaagcgcuuauuuaucggagagaaauccgauaaauaagaagcaucaaag

SEQ ID NO: 2209 - RNA, 194 nt, Artificial Sequence
  gNA Variant Scaffold
ggccggcauggucccagccuccucgcuggcgccggcugggcaacauuccgaggggaccguccccucgguaauggcgaaugggacccuacuggcgcuuuuaucucauuacuuugagagccaucaccagcgacuaugucguauggguaaagcgcuuauuuaucggagagaaauccgauaaauaagaagcaucaaag

SEQ ID NO: 2210 - RNA, 96 nt, Artificial Sequence
  gNA Variant Scaffold
gcuggcgccuuuaucugauuacuuugagagccaucaccagcgacuaugucguauggguaaagcgcuuacggacuucgguccguaagcgcaucaaag

SEQ ID NO: 2211 - RNA, 172 nt, Artificial Sequence
  gNA Variant Scaffold
cgugguuagggccacguuaaauaguugcuuaagcccuaagcguugaucuucggaucaggugcaauacuggcgcuuuuaucucauuacuuugagagccaucaccagcgacuaugucguauggguaaagcgcuuauuuaucggagagaaauccgauaaauaagaagcaucaaag

SEQ ID NO: 2212 - RNA, 197 nt, Artificial Sequence
  gNA Variant Scaffold
gggucggcauggcaucuccaccuccucgcgguccgaccugggcauccgaaggaggacgcacguccacucggauggcuaagggagagccauacuggcgcuuuuaucucauuacuuugagagccaucaccagcgacuaugucguauggguaaagcgcuuauuuaucggagagaaauccgauaaauaagaagcaucaaag

SEQ ID NO: 2213 - RNA, 171 nt, Artificial Sequence
  gNA Variant Scaffold
uacuggcgcuuuuaucucauuacuuugagagccaucaccagcgacuaugucguauggguaaagcgcuuauuuaucggagagaaauccgauaaauaagaagcaucaaagccaguacugaugaguccgugaggacgaaacgaguaagcucgucuacuggcgcuuuuaucucau

SEQ ID NO: 2214 - RNA, 99 nt, Artificial Sequence
  gNA Variant Scaffold
uacuggcgccuuuaucucauuacuuuagagagccaucaccagcgacuaugucguauggguaaagcgcuuacggacuucgguccguaagaagcaucaaag

SEQ ID NO: 2215 - RNA, 157 nt, Artificial Sequence
  gNA Variant Scaffold
cgacuacugaugaguccgugaggacgaaacgaguaagcucgucuagucguacuggcgcuuuuaucucauuacuuugagagccaucaccagcgacuaugucguauggguaaagcgcuuauuuaucggagagaaauccgauaaauaagaagcaucaaag

SEQ ID NO: 2216 - RNA, 106 nt, Artificial Sequence
  gNA Variant Scaffold
gcuggcgccuuuaucugauuacuuugagagccaucaccagcgacuaugucguauggguaaagcgcaggugggacgaccucucggucguccuaucugcgcaucaaag

SEQ ID NO: 2217 - RNA, 97 nt, Artificial Sequence
  gNA Variant Scaffold
uacuggcgccuuuaucucauuacuuuagagccaucaccagcgacuaugucguauggguaaagcgcuuacggacuucgguccguaagaagcaucaaag

SEQ ID NO: 2218 - RNA, 186 nt, Artificial Sequence
  gNA Variant Scaffold
uacuggcgcuuuuaucucauuacuuugagagccaucaccagcgacuaugucguauggguaaagcgcuuauuuaucggagagaaauccgauaaauaagaagcaucaaagcauuccucagaaaaugacaaaccuguggggcguaaguagaucuucggaucuaugaucgugcagacguuaaaaucaggu

SEQ ID NO: 2219 - RNA, 171 nt, Artificial Sequence
  gNA Variant Scaffold
uacuggcgcuuuuaucucauuacuuugagagccaucaccagcgacuaugucguauggguaaagcgcuuauuuaucggagagaaauccgauaaauaagaagcaucaaagcgacuacugaugaguccgugaggacgaaacgaguaagcucgucuagucgcguguagcgaagca

SEQ ID NO: 2220 - RNA, 186 nt, Artificial Sequence
  gNA Variant Scaffold
cauuccucagaaaaugacaaaccuguggggcguaaguagaucuucggaucuaugaucgugcagacguuaaaaucagguuacuggcgcuuuuaucucauuacuuugagagccaucaccagcgacuaugucguauggguaaagcgcuuauuuaucggagagaaauccgauaaauaagaagcaucaaag

SEQ ID NO: 2221 - RNA, 186 nt, Artificial Sequence
  gNA Variant Scaffold
uuuuggccggcauggucccagccuccucgcuggcgccggcugggcaacaugcuucggcauggcgaaugggaccccggguacuggcgcuuuuaucucauuacuuugagagccaucaccagcgacuaugucguauggguaaagcgcuuauuuaucggagagaaauccgauaaauaagaagcaucaaag

SEQ ID NO: 2222 - RNA, 171 nt, Artificial Sequence
  gNA Variant Scaffold
cgacuacugaugaguccgugaggacgaaacgaguaagcucgucuagucgcguguagcgaagcauacuggcgcuuuuaucucauuacuuugagagccaucaccagcgacuaugucguauggguaaagcgcuuauuuaucggagagaaauccgauaaauaagaagcaucaaag

SEQ ID NO: 2223 - RNA, 168 nt, Artificial Sequence
  gNA Variant Scaffold
uacuggcgcuuuuaucucauuacuuugagagccaucaccagcgacuaugucguauggguaaagcgcuuauuuaucggagagaaauccgauaaauaagaagcaucaaaggggagccccgcugaugaggucggggagaccgaaagggacuucggucccuacggggcuccc

SEQ ID NO: 2224 - RNA, 144 nt, Artificial Sequence
  gNA Variant Scaffold
ccacccccaccaccacccccacccccaccaccacccuacuggcgcuuuuaucucauuacuuugagagccaucaccagcgacuaugucguauggguaaagcgcuuauuuaucggagagaaauccgauaaauaagaagcaucaaag

SEQ ID NO: 2225 - RNA, 157 nt, Artificial Sequence
  gNA Variant Scaffold
uacuggcgcuuuuaucucauuacuuugagagccaucaccagcgacuaugucguauggguaaagcgcuuauuuaucggagagaaauccgauaaauaagaagcaucaaagcgacuacugaugaguccgugaggacgaaacgaguaagcucgucuagucg

SEQ ID NO: 2226 - RNA, 172 nt, Artificial Sequence
  gNA Variant Scaffold
uacuggcgcuuuuaucucauuacuuugagagccaucaccagcgacuaugucguauggguaaagcgcuuauuuaucggagagaaauccgauaaauaagaagcaucaaagcgugguuagggccacguuaaauaguugcuuaagcccuaagcguugaucuucggaucaggugcaa

SEQ ID NO: 2227 - RNA, 184 nt, Artificial Sequence
  gNA Variant Scaffold
uacuggcgcuuuuaucucauuacuuugagagccaucaccagcgacuaugucguauggguaaagcgcuuauuuaucggagagaaauccgauaaauaagaagcaucaaagggcaauaaagcgguuacaagcccgcaaaaauagcagaguaaugucgcgauagcgcggcauuaaugcagcuuuauug

SEQ ID NO: 2228 - RNA, 122 nt, Artificial Sequence
  gNA Variant Scaffold
uacuggcgcuuuuaucucauuacuauuaucucauuacuuugagagccaucaccagcgacuaugucguauggguaaagcgcuuauuuaucggagagaaauccgauaaauaagaagcaucaaag

SEQ ID NO: 2229 - RNA, 184 nt, Artificial Sequence
  gNA Variant Scaffold
ggcaauaaagcgguuacaagcccgcaaaaauagcagaguaaugucgcgauagcgcggcauuaaugcagcuuuauuguacuggcgcuuuuaucucauuacuuugagagccaucaccagcgacuaugucguauggguaaagcgcuuauuuaucggagagaaauccgauaaauaagaagcaucaaag

SEQ ID NO: 2230 - RNA, 185 nt, Artificial Sequence
  gNA Variant Scaffold
uacuggcgcuuuuaucucauuacuuugagagccaucaccagcgacuaugucguauggguaaagcgcuuauuuaucggagagaaauccgauaaauaagaagcaucaaagacccgcaaggccgacggcauccgccgccgcuggugcaaguccagccgccccuucgggggcgggcgcucauggguaac

SEQ ID NO: 2231 - RNA, 63 nt, Artificial Sequence
  gNA Variant Scaffold
uacuggcgcuuuuaucucauuacuuugagagccaucaccagcgacuaugucguauggguaaag

SEQ ID NO: 2232 - RNA, 168 nt, Artificial Sequence
  gNA Variant Scaffold
gggagccccgcugaugaggucggggagaccgaaagggacuucggucccuacggggcucccuacuggcgcuuuuaucucauuacuuugagagccaucaccagcgacuaugucguauggguaaagcgcuuauuuaucggagagaaauccgauaaauaagaagcaucaaag

SEQ ID NO: 2233 - RNA, 171 nt, Artificial Sequence
  gNA Variant Scaffold
ccaguacugaugaguccgugaggacgaaacgaguaagcucgucuacuggcgcuuuuaucucauuacuggcgcuuuuaucucauuacuuugagagccaucaccagcgacuaugucguauggguaaagcgcuuauuuaucggagagaaauccgauaaauaagaagcaucaaag

SEQ ID NO: 2234 - RNA, 185 nt, Artificial Sequence
  gNA Variant Scaffold
acccgcaaggccgacggcauccgccgccgcuggugcaaguccagccgccccuucgggggcgggcgcucauggguaacuacuggcgcuuuuaucucauuacuuugagagccaucaccagcgacuaugucguauggguaaagcgcuuauuuaucggagagaaauccgauaaauaagaagcaucaaag

SEQ ID NO: 2235 - RNA, 160 nt, Artificial Sequence
  gNA Variant Scaffold
ccugucaccggaugugcuuuccggucugaugaguccgugaggacgaaacagguacuggcgcuuuuaucucauuacuuugagagccaucaccagcgacuaugucguauggguaaagcgcuuauuuaucggagagaaauccgauaaauaagaagcaucaaag

SEQ ID NO: 2236 - RNA, 100 nt, Artificial Sequence
  gNA Variant Scaffold
guacuggcgccuuuaucucauuacuuugagagccaucaccagcgacuaugucguaguggguaaagcgcuuacggacuucgguccguaagaagcaucaaag

SEQ ID NO: 2237 - RNA, 91 nt, Artificial Sequence
  gNA Variant Scaffold
guacuggcgcuuuuaucugauuacuuugagagccaucaccagcgacuaugucguaguggguaaagcucccucuucggagggagcaucaaag

SEQ ID NO: 2238 - RNA, 89 nt, Artificial Sequence
  gNA Variant Scaffold
acuggcgcuuuuaucugauuacuuugagagccaucaccagcgacuaugucguaguggguaaagcucccucuucggagggagcaucaaag

SEQ ID NO: 2239 - RNA, 97 nt, Artificial Sequence
  gNA Variant Scaffold
acuggcgccuuuaucucauuacuuugagagccaucaccagcgacuaugucguauggguaaagcgcuuacggacuucgguccguaagaagcaucaaag

SEQ ID NO: 2240 - RNA, 89 nt, Artificial Sequence
  gNA Variant Scaffold
gcuggcgcuuuuaucugauuacuuugagagccaucaccagcgacuaugucguaguggguaaagcucccucuucggagggagcaucaaag

SEQ ID NO: 2241 - RNA, 88 nt, Artificial Sequence
  gNA Variant Scaffold
acuggcgcuuuuaucugauuacuuugagagccaucaccagcgacuaugucguauggguaaagcucccucuucggagggagcaucaaag

SEQ ID NO: 2242 - RNA, 97 nt, Artificial Sequence
  gNA Variant Scaffold
acuggcgccuuuaucugauuacuuugagagccaucaccagcgacuaugucguauggguaaagcgcuuacggacuucgguccguaagaagcaucaaag

SEQ ID NO: 2243 - RNA, 97 nt, Artificial Sequence
  gNA Variant Scaffold
acuggcgcuuuuaucugauuacuuugagagccaucaccagcgacuaugucguauggguaaagcgcuuacggacuucgguccguaagaagcaucaaag

SEQ ID NO: 2244 - RNA, 98 nt, Artificial Sequence
  gNA Variant Scaffold
acuggcgcuuuuaucugauuacuuugagagccaucaccagcgacuaugucguaguggguaaagcgcuuacggacuucgguccguaagaagcaucaaag

SEQ ID NO: 2245 - RNA, 89 nt, Artificial Sequence
  gNA Variant Scaffold
acuggcgcuuuuaucugauuacuuugagagccaucaccagcgacuaugucguauuggguaaagcucccucuucggagggagcaucaaag

SEQ ID NO: 2246 - RNA, 98 nt, Artificial Sequence
  gNA Variant Scaffold
acuggcgcuuuuaucugauuacuuugagagccaucaccagcgacuaugucguauuggguaaagcgcuuacggacuucgguccguaagaagcaucaaag

SEQ ID NO: 2247 - RNA, 98 nt, Artificial Sequence
  gNA Variant Scaffold
acuggcgccuuuaucaucauuacuuugagagccaucaccagcgacuaugucguauggguaaagcgcuuacggacuucgguccguaagaagcaucaaag

SEQ ID NO: 2248 - RNA, 90 nt, Artificial Sequence
  gNA Variant Scaffold
acuggcgcuuuuaucugauuacuuugagagccaucaccagcgacuaugucguaguggguaaagcgcccucuucggagggaagcaucaaag

SEQ ID NO: 2249 - RNA, 96 nt, Artificial Sequence
  gNA Variant Scaffold
acuggcgcuuuuaucugauuacuuugagagccaucaccagcgacuaugucguaguggguaaagcucacaugaggaucacccaugugagcaucaaag

SEQ ID NO: 2250 - RNA, 89 nt, Artificial Sequence
  gNA Variant Scaffold
acuggcacuuuuaccugauuacuuugagagccaacaccagcgacuaugucguaguggguaaagcucccucuucggagggagcaucaaag

SEQ ID NO: 2251 - RNA, 89 nt, Artificial Sequence
  gNA Variant Scaffold
acuggcacuuuuaucugauuacuuugagagccaucaccagcgacuaugucguaguggguaaagcucccucuucggagggagcaucaaag

SEQ ID NO: 2252 - RNA, 89 nt, Artificial Sequence
  gNA Variant Scaffold
acuggcccuuuuaucugauuacuuugagagccaucaccagcgacuaugucguaguggguaaagcucccucuucggagggagcaucaaag

SEQ ID NO: 2253 - RNA, 89 nt, Artificial Sequence
  gNA Variant Scaffold
acuggcgcuuuuaccugauuacuuugagagccaucaccagcgacuaugucguaguggguaaagcucccucuucggagggagcaucaaag

SEQ ID NO: 2254 - RNA, 89 nt, Artificial Sequence
  gNA Variant Scaffold
acuggcgcuuuuaucugauuacuuugagagccaacaccagcgacuaugucguaguggguaaagcucccucuucggagggagcaucaaag

SEQ ID NO: 2255 - RNA, 97 nt, Artificial Sequence
  gNA Variant Scaffold
acuggcaccuuuaccugauuacuuugagagccaacaccagcgacuaugucguauggguaaagcgcuuacggacuucgguccguaagaagcaucaaag

SEQ ID NO: 2256 - RNA, 97 nt, Artificial Sequence
  gNA Variant Scaffold
acuggcaccuuuaucugauuacuuugagagccaucaccagcgacuaugucguauggguaaagcgcuuacggacuucgguccguaagaagcaucaaag

SEQ ID NO: 2257 - RNA, 97 nt, Artificial Sequence
  gNA Variant Scaffold
acuggccccuuuaucugauuacuuugagagccaucaccagcgacuaugucguauggguaaagcgcuuacggacuucgguccguaagaagcaucaaag

SEQ ID NO: 2258 - RNA, 97 nt, Artificial Sequence
  gNA Variant Scaffold
acuggcgccuuuaucugauuacuuugagagccaacaccagcgacuaugucguauggguaaagcgcuuacggacuucgguccguaagaagcaucaaag

SEQ ID NO: 2259 - RNA, 89 nt, Artificial Sequence; identical to SEQ ID NO: 2240
  gNA Variant Scaffold

SEQ ID NO: 2260 - RNA, 90 nt, Artificial Sequence
  gNA Variant Scaffold
gacuggcgcuuuuaucugauuacuuugagagccaucaccagcgacuaugucguaguggguaaagcucccucuucggagggagcaucaaag

SEQ ID NO: 2261 - RNA, 90 nt, Artificial Sequence
  gNA Variant Scaffold
acuggcgccuuuaucugauuacuuuggagagccaucaccagcgacuaugucguaguggguaaagcucccucuucggagggagcaucaaag

SEQ ID NO: 2262 - RNA, 89 nt, Artificial Sequence
  gNA Variant Scaffold
acuggcgcauuuaucugauuacuuugugagccaucaccagcgacuaugucguaguggguaaagcucccucuucggagggagcaucaaag

SEQ ID NO: 2263 - RNA, 89 nt, Artificial Sequence
  gNA Variant Scaffold
acuggcgccuuuaucugauuacuuugagagccaucaccagcgacuaugucguaguggguaaagcucccucuucggagggagcaucaaag

SEQ ID NO: 2264 - RNA, 90 nt, Artificial Sequence
  gNA Variant Scaffold
acuggcgcuuuuaucugauuacuuuggagagccaucaccagcgacuaugucguaguggguaaagcucccucuucggagggagcaucaaag

SEQ ID NO: 2265 - RNA, 89 nt, Artificial Sequence
  gNA Variant Scaffold
acuggcgcauuuaucugauuacuuugagagccaucaccagcgacuaugucguaguggguaaagcucccucuucggagggagcaucaaag

SEQ ID NO: 2266 - RNA, 89 nt, Artificial Sequence
  gNA Variant Scaffold
acuggcgcuuuuaucugauuacuuugugagccaucaccagcgacuaugucguaguggguaaagcucccucuucggagggagcaucaaag

SEQ ID NO: 2267 - RNA, 90 nt, Artificial Sequence
  gNA Variant Scaffold
acuggcgcuuuuauucugauuacuuugagagccaucaccagcgacuaugucguaguggguaaagcucccucuucggagggagcaucaaag

SEQ ID NO: 2268 - RNA, 88 nt, Artificial Sequence
  gNA Variant Scaffold
acggcgcuuuuaucugauuacuuugagagccaucaccagcgacuaugucguaguggguaaagcucccucuucggagggagcaucaaag

SEQ ID NO: 2269 - RNA, 89 nt, Artificial Sequence
  gNA Variant Scaffold
acuggcgcuuuuauaugauuacuuugagagccaucaccagcgacuaugucguaguggguaaagcucccucuucggagggagcaucaaag

SEQ ID NO: 2270 - RNA, 90 nt, Artificial Sequence
  gNA Variant Scaffold
acuggcgcuuuuaucuugauuacuuugagagccaucaccagcgacuaugucguaguggguaaagcucccucuucggagggagcaucaaag

SEQ ID NO: 2271 - RNA, 89 nt, Artificial Sequence
  gNA Variant Scaffold
acuggcgcuuuuaucugauuacuuugagagccagcaccagcgacuaugucguaguggguaaagcucccucuucggagggagcaucaaag

SEQ ID NO: 2272 - RNA, 89 nt, Artificial Sequence
  gNA Variant Scaffold
acuggcgcuguuaucugauuacuucgagagccaucaccagcgacuaugucguaguggguaaagcucccucuucggagggagcaucgaag

SEQ ID NO: 2273 - RNA, 89 nt, Artificial Sequence
  gNA Variant Scaffold
acuggcgcucuuaucugauuacuucgagagccaucaccagcgacuaugucguaguggguaaagcucccucuucggagggagcaucgaag

SEQ ID NO: 2274 - RNA, 89 nt, Artificial Sequence
  gNA Variant Scaffold
acuggcgcuuguaucugauuacucugagagccaucaccagcgacuaugucguaguggguaaagcucccucuucggagggagcaucagag

SEQ ID NO: 2275 - RNA, 89 nt, Artificial Sequence
  gNA Variant Scaffold
acuggcgcuucuaucugauuacucugagagccaucaccagcgacuaugucguaguggguaaagcucccucuucggagggagcaucagag

SEQ ID NO: 2276 - RNA, 89 nt, Artificial Sequence
  gNA Variant Scaffold
acuggcgcuuugaucugauuaccuugagagccaucaccagcgacuaugucguaguggguaaagcucccucuucggagggagcaucaagg

SEQ ID NO: 2277 - RNA, 89 nt, Artificial Sequence
  gNA Variant Scaffold
acuggcgcuuucaucugauuaccuugagagccaucaccagcgacuaugucguaguggguaaagcucccucuucggagggagcaucaagg

SEQ ID NO: 2278 - RNA, 89 nt, Artificial Sequence
  gNA Variant Scaffold
acuggcgcuguuaucugauuacuuugagagccaucaccagcgacuaugucguaguggguaaagcucccucuucggagggagcaucaaag

SEQ ID NO: 2279 - RNA, 89 nt, Artificial Sequence
  gNA Variant Scaffold
acuggcgcuuuuaucugauuacuuugagagccaucaccagcgacuaugucguaguggguaaagcucccucuucggagggagcaucgaag

SEQ ID NO: 2280 - RNA, 89 nt, Artificial Sequence
  gNA Variant Scaffold
acuggcgcuuuuaucugauuacuucgagagccaucaccagcgacuaugucguaguggguaaagcucccucuucggagggagcaucaaag

SEQ ID NO: 2281 - DNA, 108 bp, Artificial Sequence
  scaffold variant
tactggcgcttttatctcattactttgagagccatcaccagcgactatgtcgtatgggtaaagcgcttatttatcgagagaaatccgataaataagagagcatcaaag

SEQ ID NO: 2282 - DNA, 107 bp, Artificial Sequence; identical to SEQ ID NO: 1262
  scaffold variant

SEQ ID NO: 2283 - DNA, 109 bp, Artificial Sequence; identical to SEQ ID NO: 980
  scaffold variant

SEQ ID NO: 2284 - DNA, 107 bp, Artificial Sequence; identical to SEQ ID NO: 1337
  scaffold variant

SEQ ID NO: 2285 - DNA, 109 bp, Artificial Sequence; identical to SEQ ID NO: 1119
  scaffold variant

SEQ ID NO: 2286 - DNA, 107 bp, Artificial Sequence; identical to SEQ ID NO: 833
  scaffold variant

SEQ ID NO: 2287 - DNA, 107 bp, Artificial Sequence
  scaffold variant
cactggcgcttttatctcattactttgagagccatcaccagcgactatgtcgtatgggtaaagcgcttatttatcgagagaaatccgataaataagaagcatcaaag

SEQ ID NO: 2288 - DNA, 109 bp, Artificial Sequence; identical to SEQ ID NO: 1010
  scaffold variant

SEQ ID NO: 2289 - DNA, 107 bp, Artificial Sequence; identical to SEQ ID NO: 833
  scaffold variant

SEQ ID NO: 2290 - DNA, 107 bp, Artificial Sequence; identical to SEQ ID NO: 833
  scaffold variant

SEQ ID NO: 2291 - DNA, 108 bp, Artificial Sequence
  scaffold variant
tcactggcgcttttatctcattactttgagagccatcaccagcgactatgtcgtatgggtaaagcgcttatttatcaagagaaatccgataaataagaagcatcaaag

SEQ ID NO: 2292 - DNA, 106 bp, Artificial Sequence; identical to SEQ ID NO: 1784
  scaffold variant

SEQ ID NO: 2293 - DNA, 107 bp, Artificial Sequence; identical to SEQ ID NO: 1678
  scaffold variant

SEQ ID NO: 2294 - DNA, 109 bp, Artificial Sequence; identical to SEQ ID NO: 1010
  scaffold variant

SEQ ID NO: 2295 - DNA, 109 bp, Artificial Sequence; identical to SEQ ID NO: 837
  scaffold variant

SEQ ID NO: 2296 - DNA, 108 bp, Artificial Sequence; identical to SEQ ID NO: 389
  scaffold variant

SEQ ID NO: 2297 - DNA, 107 bp, Artificial Sequence; identical to SEQ ID NO: 833
  scaffold variant

SEQ ID NO: 2298 - DNA, 107 bp, Artificial Sequence
  scaffold variant
tactggcgcttttatctcattactttgagagccatcaccagcgactatgtcgtatgggtaaagcgcttatttatcggagagaaagagataaataagaagcatcaaag

SEQ ID NO: 2299 - DNA, 109 bp, Artificial Sequence
  scaffold variant
tactggcgcttttatcttcattactttgagagccatcaccagcgactatgtcgtatgggtaaagcgcttatttatcggggagaaatccgataaataagaagcatcaaag

SEQ ID NO: 2300 - DNA, 108 bp, Artificial Sequence; identical to SEQ ID NO: 892
  scaffold variant

SEQ ID NO: 2301 - DNA, 107 bp, Artificial Sequence; identical to SEQ ID NO: 1707
  scaffold variant

SEQ ID NO: 2302 - DNA, 108 bp, Artificial Sequence
  scaffold variant
tactggcgcttttatctcattactttgagagccatcaccagcgactatgtcgtattgggtaaagcgcttatttatcggaagaaatccgataaataagaagcatcaaag

SEQ ID NO: 2303 - DNA, 110 bp, Artificial Sequence
  scaffold variant
tactggcgcttttatctctattactttgagagccatcaccagcgactatgtcgtattgggtaaagcgcttatttatcggagagaaatccgataaataagaagcatcaaag

SEQ ID NO: 2304 - DNA, 107 bp, Artificial Sequence; identical to SEQ ID NO: 1757
  scaffold variant

SEQ ID NO: 2305 - DNA, 106 bp, Artificial Sequence; identical to SEQ ID NO: 385
  scaffold variant

SEQ ID NO: 2306 - DNA, 108 bp, Artificial Sequence
  scaffold variant
tactggcgcttttatctcgattactttgagagccatcaccagcgactatgtcgtatgggtaaagcgcttatttatcggagagaaatcgataaataagaagcatcaaag

SEQ ID NO: 2307 - DNA, 107 bp, Artificial Sequence; identical to SEQ ID NO: 1036
  scaffold variant

SEQ ID NO: 2308 - DNA, 108 bp, Artificial Sequence
  scaffold variant
gctggcgcttttatctcattactttgagagccatcaccagcgactatgtcgtatgggtaaagcgcttatttatcggagagacaatccgataaataagaagcatcaaag

SEQ ID NO: 2309 - DNA, 108 bp, Artificial Sequence
  scaffold variant
atactggcgcttttatctcattactttgagagccatcaccagcgactatgtcgtatgggtaaagcgcttatttatctagagaaatccgataaataagaagcatcaaag

SEQ ID NO: 2310 - DNA, 109 bp, Artificial Sequence; identical to SEQ ID NO: 1010
  scaffold variant

SEQ ID NO: 2311 - DNA, 107 bp, Artificial Sequence; identical to SEQ ID NO: 1262
  scaffold variant

SEQ ID NO: 2312 - DNA, 109 bp, Artificial Sequence; identical to SEQ ID NO: 740
  scaffold variant

SEQ ID NO: 2313 - DNA, 108 bp, Artificial Sequence
  scaffold variant
tactggcgcttttatctcattactttgagagccatcaccagcgactatgtcgtatgggtaaagcgcttatttatcgggagaaatccgataaataagtaagcatcaaag

SEQ ID NO: 2314 - DNA, 106 bp, Artificial Sequence; identical to SEQ ID NO: 459
  scaffold variant

SEQ ID NO: 2315 - DNA, 108 bp, Artificial Sequence
  scaffold variant
tactggcgcttttatctcattactttgagagccatcaccagcgactatgtcgtatgggtaaagcggtatttatcggagagaaatccgaataaataagaagcatcaaag

SEQ ID NO: 2316 - DNA, 110 bp, Artificial Sequence
  scaffold variant
tactggcgcttttatctcattactttgagagccatcaccagcgactatgtcgtatgggtaaagcgcttattgtatcggagagaaatcccgataaataagaagcatcaaag

SEQ ID NO: 2317 - DNA, 110 bp, Artificial Sequence
  scaffold variant
tactggcgcttttatctcattactttgagagccatcaccagcgactatgtcgtatgggtaaagcgcttatttatctggagagaaatcgcgataaataagaagcatcaaag

SEQ ID NO: 2318 - DNA, 107 bp, Artificial Sequence; identical to SEQ ID NO: 833
  scaffold variant

SEQ ID NO: 2319 - DNA, 107 bp, Artificial Sequence; identical to SEQ ID NO: 1915
  scaffold variant

SEQ ID NO: 2320 - DNA, 108 bp, Artificial Sequence
  scaffold variant
tactggcgcttttatctcattactttgagagccatcaccagcgactatgtcgtatgggtaaagcgcttatttatacggagagaaatccataaataagaagcatcaaag

SEQ ID NO: 2321 - DNA, 107 bp, Artificial Sequence; identical to SEQ ID NO: 1426
  scaffold variant

SEQ ID NO: 2322 - DNA, 110 bp, Artificial Sequence
  scaffold variant
tactggcgcttttatactcattactttgagagccatcaccagcgactatgtcgtatgggtaaagcgcttatttagtcggagagaaatccgataaataagaagcatcaaag

SEQ ID NO: 2323 - DNA, 106 bp, Artificial Sequence
  scaffold variant
tactggcgcttttatctcattactttgagagccatcaccagcgactatgtcgtatgggtaaagcgcttatttatcgagagaaatccataaataagaagcatcaaag

SEQ ID NO: 2324 - DNA, 107 bp, Artificial Sequence; identical to SEQ ID NO: 483
  scaffold variant

SEQ ID NO: 2325 - DNA, 107 bp, Artificial Sequence; identical to SEQ ID NO: 1915
  scaffold variant

SEQ ID NO: 2326 - DNA, 107 bp, Artificial Sequence; identical to SEQ ID NO: 972
  scaffold variant

SEQ ID NO: 2327 - DNA, 107 bp, Artificial Sequence; identical to SEQ ID NO: 833
  scaffold variant

SEQ ID NO: 2328 - DNA, 107 bp, Artificial Sequence; identical to SEQ ID NO: 1262
  scaffold variant

SEQ ID NO: 2329 - DNA, 110 bp, Artificial Sequence
  scaffold variant
atactggcgcttttatctcattactttgagagccatcaccagcgactatgtcgtatgggtaaagcgcttatttaatcggagagaaatccgataaataagaagcatcaaag

SEQ ID NO: 2330 - DNA, 107 bp, Artificial Sequence; identical to SEQ ID NO: 972
  scaffold variant

SEQ ID NO: 2331 - DNA, 110 bp, Artificial Sequence
  scaffold variant
tactggcgcttttatctgcattactttgagagccatcaccagcgactatgtcgtatgggtaaagcgcttatttatcggagagaaatccgataaataagagagcatcaaag

SEQ ID NO: 2332 - DNA, 107 bp, Artificial Sequence; identical to SEQ ID NO: 1036
  scaffold variant

SEQ ID NO: 2333 - DNA, 106 bp, Artificial Sequence; identical to SEQ ID NO: 385
  scaffold variant

SEQ ID NO: 2334 - DNA, 107 bp, Artificial Sequence; identical to SEQ ID NO: 1218
  scaffold variant

SEQ ID NO: 2335 - DNA, 109 bp, Artificial Sequence; identical to SEQ ID NO: 1048
  scaffold variant

SEQ ID NO: 2336 - DNA, 107 bp, Artificial Sequence; identical to SEQ ID NO: 1707
  scaffold variant

SEQ ID NO: 2337 - DNA, 110 bp, Artificial Sequence
  scaffold variant
tactggcgcttttatctcgattactttgagagccatcaccagcgactatgtcgtatgggtaaagcgcttatttatcgtgagagaaatccgataaataagaagcatcaaag

SEQ ID NO: 2338 - DNA, 107 bp, Artificial Sequence; identical to SEQ ID NO: 1036
  scaffold variant

SEQ ID NO: 2339 - DNA, 106 bp, Artificial Sequence; identical to SEQ ID NO: 1784
  scaffold variant

SEQ ID NO: 2340 - DNA, 107 bp, Artificial Sequence; identical to SEQ ID NO: 1915
  scaffold variant

SEQ ID NO: 2341 - DNA, 109 bp, Artificial Sequence; identical to SEQ ID NO: 912
  scaffold variant

SEQ ID NO: 2342 - DNA, 107 bp, Artificial Sequence; identical to SEQ ID NO: 1097
  scaffold variant

SEQ ID NO: 2343 - DNA, 107 bp, Artificial Sequence; identical to SEQ ID NO: 1262
  scaffold variant

SEQ ID NO: 2344 - DNA, 107 bp, Artificial Sequence; identical to SEQ ID NO: 765
  scaffold variant

SEQ ID NO: 2345 - DNA, 107 bp, Artificial Sequence; identical to SEQ ID NO: 833
  scaffold variant

SEQ ID NO: 2346 - DNA, 108 bp, Artificial Sequence
  scaffold variant
tactggcgcttttatctcattactttgagagccatcaccagcgactatgtcgtatgggtaaagcgcttatttatcgagagaaatccgataaataagaagcatcaaagc

SEQ ID NO: 2347 - DNA, 106 bp, Artificial Sequence; identical to SEQ ID NO: 484
  scaffold variant

SEQ ID NO: 2348 - DNA, 109 bp, Artificial Sequence; identical to SEQ ID NO: 1165
  scaffold variant

SEQ ID NO: 2349 - DNA, 107 bp, Artificial Sequence; identical to SEQ ID NO: 915
  scaffold variant

SEQ ID NO: 2350 - DNA, 106 bp, Artificial Sequence
  scaffold variant
tactggcgcttttatctcattactttgagagccatcaccagcgactatgtcgtatgggtaaagcgcttatttatcggagagatccgataaataagaagcatcaaag

SEQ ID NO: 2351 - DNA, 107 bp, Artificial Sequence; identical to SEQ ID NO: 1337
  scaffold variant

SEQ ID NO: 2352 - DNA, 109 bp, Artificial Sequence; identical to SEQ ID NO: 837
  scaffold variant

SEQ ID NO: 2353 - DNA, 107 bp, Artificial Sequence; identical to SEQ ID NO: 1091
  scaffold variant

SEQ ID NO: 2354 - DNA, 109 bp, Artificial Sequence; identical to SEQ ID NO: 740
  scaffold variant

SEQ ID NO: 2355 - DNA, 107 bp, Artificial Sequence; identical to SEQ ID NO: 833
  scaffold variant

SEQ ID NO: 2356 - DNA, 109 bp, Artificial Sequence; identical to SEQ ID NO: 518
  scaffold variant

SEQ ID NO: 2357 - DNA, 109 bp, Artificial Sequence
  scaffold variant
tactggcgcttttatcctcattactttgagagccatcaccagcgactatgtcgtatgggtaaagcgcttatttatcggggagaaatccgataaataagaagcatcaaag

SEQ ID NO: 2358 - DNA, 107 bp, Artificial Sequence; identical to SEQ ID NO: 1915
  scaffold variant

SEQ ID NO: 2359 - DNA, 108 bp, Artificial Sequence
  scaffold variant
tactggcgcttttatctcattactttgagagccatcaccagcgactatgtcgtatgggtaaagcggtatttatcggagagaaatcctgataaataagaagcatcaaag

SEQ ID NO: 2360 - DNA, 107 bp, Artificial Sequence; identical to SEQ ID NO: 1097
  scaffold variant

SEQ ID NO: 2361 - DNA, 106 bp, Artificial Sequence; identical to SEQ ID NO: 618
  scaffold variant

SEQ ID NO: 2362 - DNA, 107 bp, Artificial Sequence; identical to SEQ ID NO: 1337
  scaffold variant

SEQ ID NO: 2363 - DNA, 107 bp, Artificial Sequence; identical to SEQ ID NO: 1091
  scaffold variant

SEQ ID NO: 2364 - DNA, 107 bp, Artificial Sequence; identical to SEQ ID NO: 1262
  scaffold variant

SEQ ID NO: 2365 - DNA, 105 bp, Artificial Sequence
  scaffold variant
ctggcgcttttatctcattactttgagagccatcaccagcgactatgtcgtatgggtaaagcgcttatttatcggagagcatccgataaataagaagcatcaaag

SEQ ID NO: 2366 - DNA, 109 bp, Artificial Sequence; identical to SEQ ID NO: 1004
  scaffold variant

SEQ ID NO: 2367 - DNA, 106 bp, Artificial Sequence; identical to SEQ ID NO: 401
  scaffold variant

SEQ ID NO: 2368 - DNA, 109 bp, Artificial Sequence; identical to SEQ ID NO: 740
  scaffold variant

SEQ ID NO: 2369 - DNA, 105 bp, Artificial Sequence
  scaffold variant
tactggcgcttttatctcattactttgagagccatcaccagcgactatgtcgtatgggtaaagcggtatttatcggagaaatccgataaataagaagcatcaaag

SEQ ID NO: 2370 - DNA, 108 bp, Artificial Sequence
  scaffold variant
tactggcgcttttattctcattactttgagagccatcaccagcgactatgtcgtatgggtaaagcgcttatttatcggagagaaaacgataaataagaagcatcaaag

SEQ ID NO: 2371 - DNA, 108 bp, Artificial Sequence
  scaffold variant
tactggcgcttttatctgcattactttgagagccatcaccagcgactatgtcgtatgggtaaagcgcttatttatcgggagaaatccgataaataagaagcatcaaag

SEQ ID NO: 2372 - DNA, 109 bp, Artificial Sequence; identical to SEQ ID NO: 1786
  scaffold variant

SEQ ID NO: 2373 - DNA, 109 bp, Artificial Sequence; identical to SEQ ID NO: 980
  scaffold variant

SEQ ID NO: 2374 - DNA, 109 bp, Artificial Sequence; identical to SEQ ID NO: 1183
  scaffold variant

SEQ ID NO: 2375 - DNA, 106 bp, Artificial Sequence
  scaffold variant
tactggcgcttttattcattactttgagagccatcaccagcgactatgtcgtatgggtaaagcgcttatttatccagagaaatccgataaataagaagcatcaaag

SEQ ID NO: 2376 - DNA, 108 bp, Artificial Sequence
  scaffold variant
tacggcgcttttatctcattactttgagagccatcaccagcgactatgtcgtatgggtaaagcgcttattgtatcggagagaaatccgataaataagaagcatcaaag

SEQ ID NO: 2377 - DNA, 107 bp, Artificial Sequence; identical to SEQ ID NO: 1262
  scaffold variant

SEQ ID NO: 2378 - DNA, 108 bp, Artificial Sequence
  scaffold variant
tactggcgcttttatctcattactttgagagccatcaccagcgactatgtcgtatgggtaaagcgcttatttacggagagaaatctcgataaataagaagcatcaaag

SEQ ID NO: 2379 - DNA, 110 bp, Artificial Sequence
  scaffold variant
tactggcgcttttatactcattactttgagagccatcaccagcgactatgtcgtatgggtaaagcgcttatttatacggagagaaatccgataaataagaagcatcaaag

SEQ ID NO: 2380 - DNA, 107 bp, Artificial Sequence
  scaffold variant
tactggcgcctttatctcattactttgagagccatcaccagcgactatgtcgtatgggtaaagcgcttatttattgagagaaatccgataaataagaagcatcaaag

SEQ ID NO: 2381 - DNA, 106 bp, Artificial Sequence; identical to SEQ ID NO: 1784
  scaffold variant

SEQ ID NO: 2382 - DNA, 108 bp, Artificial Sequence
  scaffold variant
tactggcgcttttatctcattactttgagagccatcaccagcgactatgtcgtagtgggtaaagcgcttatttatccagagaaatccgataaataagaagcatcaaag

SEQ ID NO: 2383 - DNA, 107 bp, Artificial Sequence
  scaffold variant
tactggcgcttttatctcattactttgagagccataaccagcgactatgtcgtatgggtaaagcgcttatttatccagagaaatccgataaataagaagcatcaaag

SEQ ID NO: 2384 - DNA, 109 bp, Artificial Sequence; identical to SEQ ID NO: 1048
  scaffold variant

SEQ ID NO: 2385 - DNA, 110 bp, Artificial Sequence
  scaffold variant
tactggcgcttttatctcattactttgagagccatcaccagcgactatgtcgtatgggtaaagcgcttatttatacggagagaaatcacgataaataagaagcatcaaag

SEQ ID NO: 2386 - DNA, 108 bp, Artificial Sequence
  scaffold variant
gctggcgcttttaatctcattactttgagagccatcaccagcgactatgtcgtatgggtaaagcgcttatttatcggagagaaatccgataaataagaagcatcaaag

SEQ ID NO: 2387 - DNA, 107 bp, Artificial Sequence
  scaffold variant
tactggcgcttttatctcattactttgagagccatcaccagcgactatgtcgtatgggtaaagcgcttatttatcggagagaaatccctaaataagaagcatcaaag

SEQ ID NO: 2388 - DNA, 107 bp, Artificial Sequence
  scaffold variant
atggcgcttttatctcattactttgagagccatcaccagcgactatgtcgtatgggtaaagcgcttatttaatcggagagaaatccgataaataagaagcatcaaag

SEQ ID NO: 2389 - DNA, 107 bp, Artificial Sequence; identical to SEQ ID NO: 833
  scaffold variant

SEQ ID NO: 2390 - DNA, 112 bp, Artificial Sequence
  scaffold variant
taactggcgcttttatctcattactttgagagccatcaccagcgactatgtcgtagtgggtaaagcgcttatttatcggagagaaatccgataaataagtaaagcatcaaag

SEQ ID NO: 2391 - DNA, 109 bp, Artificial Sequence
  scaffold variant
tactggcgcttttatctcattactttgagagccatcaccagcgactatgtcgtatgggtaaagcgcttatttatcggtagagaaatccgataaataagaagcatcaaag

SEQ ID NO: 2392 - DNA, 106 bp, Artificial Sequence
  scaffold variant
tactggcgcttttatctcattactttgagagccatcaccagcgactatgtcgtatgggtaaagcgcttatttatcgagagaaatccgatagtaagaagcatcaaag

SEQ ID NO: 2393 - DNA, 107 bp, Artificial Sequence; identical to SEQ ID NO: 1426
  scaffold variant

SEQ ID NO: 2394 - DNA, 110 bp, Artificial Sequence
  scaffold variant
tactggcgcttttatctcattactttgagagccatcaccagcgactatgtcgtatgggtaaagcgcttatttatcaggagagaaatcccgataaataagaagcatcaaag

SEQ ID NO: 2395 - DNA, 110 bp, Artificial Sequence
  scaffold variant
tactggcgcttttatctcattactttgagagccatcaccagcgactatgtcgtatgggtaaagcgcttattttatcggagagaaatctcgataaataagaagcatcaaag

SEQ ID NO: 2396 - DNA, 107 bp, Artificial Sequence; identical to SEQ ID NO: 1927
  scaffold variant

SEQ ID NO: 2397 - DNA, 110 bp, Artificial Sequence
  scaffold variant
tactggcgcttttatctcattactttgagagccatcaccagcgactatgtcgtatgggtaaagcgcttatttaatcggagagaaatcgcgataaataagaagcatcaaag

SEQ ID NO: 2398 - DNA, 107 bp, Artificial Sequence
  scaffold variant
tactggcgcttttatctcattactttgagagccatcaccagcgactatgtcgtatgggtaaagcgcttatttgcggagagaaatccgataaataagaagcatcaaag

SEQ ID NO: 2399 - DNA, 109 bp, Artificial Sequence; identical to SEQ ID NO: 980
  scaffold variant

SEQ ID NO: 2400 - DNA, 108 bp, Artificial Sequence
  scaffold variant
tactggcgcttttatctctattactttgagagccatcaccagcgactatgtcgtatgggtaaagcgcttatttatcggagagtatccgataaataagaagcatcaaag

SEQ ID NO: 2401 - DNA, 107 bp, Artificial Sequence
  scaffold variant
tactggcgcttttatttcattactttgagagccatcaccagcgactatgtcgtatgggtaaagcgcttatttatcgggagaaatccgataaataagaagcatcaaag

SEQ ID NO: 2402 - DNA, 109 bp, Artificial Sequence; identical to SEQ ID NO: 1048
  scaffold variant

SEQ ID NO: 2403 - DNA, 107 bp, Artificial Sequence
  scaffold variant
cctggcgcttttatctcattactttgagagccatcaccagcgactatgtcgtatgggtaaagcgcttatttatcggaaagaaatccgataaataagaagcatcaaag

SEQ ID NO: 2404 - DNA, 106 bp, Artificial Sequence
  scaffold variant
actggcgcttttatctattactttgagagccatcaccagcgactatgtcgtatgggtaaagcgcttatttatcggagagaaatccgataaataagaagcatcaaag

SEQ ID NO: 2405 - DNA, 106 bp, Artificial Sequence
  scaffold variant
tactggcgcttttatctcattactttgagagccatcaccagcgactatgtcgtatgggtaaagcgcttattttcggagagaaatcgataaataagaagcatcaaag

SEQ ID NO: 2406 - DNA, 107 bp, Artificial Sequence; identical to SEQ ID NO: 972
  scaffold variant

SEQ ID NO: 2407 - DNA, 108 bp, Artificial Sequence
  scaffold variant
tactggcgcttttatctcattactttgagagccatcaccagcgactatgtcgtatgggtaaagcgcttatttatggagagaaatcccgataaataagaagcatcaaag

SEQ ID NO: 2408 - DNA, 109 bp, Artificial Sequence; identical to SEQ ID NO: 1183
  scaffold variant

SEQ ID NO: 2409 - DNA, 107 bp, Artificial Sequence; identical to SEQ ID NO: 1337
  scaffold variant

SEQ ID NO: 2410 - DNA, 109 bp, Artificial Sequence
  scaffold variant
tcctggcgcttttatctcattactttgagagccatcaccagcgactatgtcgtatgggtaaagcgcttatttatgcggagagaaatccgataaataagaagcatcaaag

SEQ ID NO: 2411 - DNA, 109 bp, Artificial Sequence; identical to SEQ ID NO: 740
  scaffold variant

SEQ ID NO: 2412 - DNA, 109 bp, Artificial Sequence; identical to SEQ ID NO: 1555
  scaffold variant

SEQ ID NO: 2413 - DNA, 107 bp, Artificial Sequence
  scaffold variant
tactggcgcttttatctcattactttgagagccatcaccagcgactatgtcgtatgggtaaagcgcttatttatcggagagtatccgataaataagaagcatcaaag

SEQ ID NO: 2414 - DNA, 106 bp, Artificial Sequence; identical to SEQ ID NO: 1934
  scaffold variant

SEQ ID NO: 2415 - DNA, 110 bp, Artificial Sequence
  scaffold variant
tactggcgcttttatctcattactttgagagccatcaccagcgactatgtcgtatgggtaaagcgcttattctatcggagagaaatcccgataaataagaagcatcaaag

SEQ ID NO: 2416 - DNA, 105 bp, Artificial Sequence
  scaffold variant
atggcgcttttatctcattactttgagagccatcaccagcgactatgtcgtatgggtaaagcgcttatttatcggagagcatccgataaataagaagcatcaaag

SEQ ID NO: 2417 - DNA, 110 bp, Artificial Sequence
  scaffold variant
tactggcgcttttatctcattactttgagagccatcaccagcgactatgtcgtatgggtaaagcgcttatttatcgggagagaaatccgataaataagagagcatcaaag

SEQ ID NO: 2418 - DNA, 107 bp, Artificial Sequence; identical to SEQ ID NO: 1707
  scaffold variant

SEQ ID NO: 2419 - DNA, 105 bp, Artificial Sequence
  scaffold variant
actggcgcttttatctcattactttgagagccatcaccagcgactatgtcgtatgggtaaagcgtatttatcggagagaaatccgataaataagaagcatcaaag

SEQ ID NO: 2420 - DNA, 110 bp, Artificial Sequence
  scaffold variant
tactggcgcttttatactcattactttgagagccatcaccagcgactatgtcgtatgggtaaagcgcttatttatcggagagaaatcccgataaataagaagcatcaaag

SEQ ID NO: 2421 - DNA, 109 bp, Artificial Sequence; identical to SEQ ID NO: 980
  scaffold variant

SEQ ID NO: 2422 - DNA, 107 bp, Artificial Sequence; identical to SEQ ID NO: 1426
  scaffold variant

SEQ ID NO: 2423 - DNA, 109 bp, Artificial Sequence; identical to SEQ ID NO: 1048
  scaffold variant

SEQ ID NO: 2424 - DNA, 107 bp, Artificial Sequence; identical to SEQ ID NO: 972
  scaffold variant

SEQ ID NO: 2425 - DNA, 107 bp, Artificial Sequence; identical to SEQ ID NO: 1036
  scaffold variant

SEQ ID NO: 2426 - DNA, 109 bp, Artificial Sequence; identical to SEQ ID NO: 1786
  scaffold variant

SEQ ID NO: 2427 - DNA, 105 bp, Artificial Sequence
  scaffold variant
ctggcgcttttatctcattactttgagagccatcaccagcgactatgtcgtatgggtaaagcgcttatttatcggagaggatccgataaataagaagcatcaaag

SEQ ID NO: 2428 - DNA, 109 bp, Artificial Sequence; identical to SEQ ID NO: 1177
  scaffold variant

SEQ ID NO: 2429 - DNA, 107 bp, Artificial Sequence; identical to SEQ ID NO: 2413
  scaffold variant

SEQ ID NO: 2430 - DNA, 107 bp, Artificial Sequence; identical to SEQ ID NO: 833
  scaffold variant

SEQ ID NO: 2431 - DNA, 109 bp, Artificial Sequence; identical to SEQ ID NO: 740
  scaffold variant

SEQ ID NO: 2432 - DNA, 108 bp, Artificial Sequence
  scaffold variant
tactggcgcttttatctcattactttgagagccatcaccagcgactatgtcgtatgggtaaagcgcttatttatgcggagagaaatccgataataagaagcatcaaag

SEQ ID NO: 2433 - DNA, 109 bp, Artificial Sequence; identical to SEQ ID NO: 1183
  scaffold variant

SEQ ID NO: 2434 - DNA, 107 bp, Artificial Sequence; identical to SEQ ID NO: 1915
  scaffold variant

SEQ ID NO: 2435 - DNA, 107 bp, Artificial Sequence; identical to SEQ ID NO: 1262
  scaffold variant

SEQ ID NO: 2436 - DNA, 109 bp, Artificial Sequence; identical to SEQ ID NO: 1555
  scaffold variant

SEQ ID NO: 2437 - DNA, 107 bp, Artificial Sequence; identical to SEQ ID NO: 833
  scaffold variant

SEQ ID NO: 2438 - DNA, 109 bp, Artificial Sequence; identical to SEQ ID NO: 740
  scaffold variant

SEQ ID NO: 2439 - DNA, 106 bp, Artificial Sequence; identical to SEQ ID NO: 403
  scaffold variant

SEQ ID NO: 2440 - DNA, 107 bp, Artificial Sequence; identical to SEQ ID NO: 1337
  scaffold variant

SEQ ID NO: 2441 - DNA, 107 bp, Artificial Sequence; identical to SEQ ID NO: 1337
  scaffold variant

SEQ ID NO: 2442 - DNA, 109 bp, Artificial Sequence; identical to SEQ ID NO: 1048
  scaffold variant

SEQ ID NO: 2443 - DNA, 109 bp, Artificial Sequence; identical to SEQ ID NO: 1183
  scaffold variant

SEQ ID NO: 2444 - DNA, 106 bp, Artificial Sequence
  scaffold variant
tggcgcttttatctcattactttgagagccatcaccagcgactatgtcgtatgggtaaagcgcttatttatcggagagaaatcacgataaataagaagcatcaaag

SEQ ID NO: 2445 - DNA, 107 bp, Artificial Sequence; identical to SEQ ID NO: 1218
  scaffold variant

SEQ ID NO: 2446 - DNA, 109 bp, Artificial Sequence; identical to SEQ ID NO: 910
  scaffold variant

SEQ ID NO: 2447 - DNA, 110 bp, Artificial Sequence
  scaffold variant
atactggcgcttttatctcattactttgagagccatcaccagcgactatgtcgtatgggtaaagcgcttatttatcgagagagaaatccgataaataagaagcatcaaag

SEQ ID NO: 2448 - DNA, 108 bp, Artificial Sequence
  scaffold variant
tactggcgcttttatctcattactttgagagccatcaccagcgactatgtcgtatgggtaaagcgcttatttagtcggagagaaatcgataaataagaagcatcaaag

SEQ ID NO: 2449 - DNA, 109 bp, Artificial Sequence
  scaffold variant
tactggcgcttttatctcattactttgagagccatcaccagcgactatgtcgtatgggtaaagcgcttatttatagggagagaaatccgataaataagaagcatcaaag

SEQ ID NO: 2450 - DNA, 110 bp, Artificial Sequence
  scaffold variant
tactggcgcttttatctcattactttgagagccatcaccagcgactatgtcgtatgggtaaagcgcttatttagtcggagagaaatctcgataaataagaagcatcaaag

SEQ ID NO: 2451 - DNA, 107 bp, Artificial Sequence; identical to SEQ ID NO: 2413
  scaffold variant

SEQ ID NO: 2452 - DNA, 108 bp, Artificial Sequence; identical to SEQ ID NO: 382
  scaffold variant

SEQ ID NO: 2453 - DNA, 107 bp, Artificial Sequence
  scaffold variant
cctgtcgcttttatctcattactttgagagccatcaccagcgactatgtcgtatgggtaaagcgcttatttatcggagagaaatccgataaataagaagcatcaaag

SEQ ID NO: 2454 - DNA, 107 bp, Artificial Sequence
  scaffold variant
tactggcgcttttatctcattactttgagagccatcaccagcgactatgtcgtatgggtaaagcgcttatttatcggagatcatccgataaataagaagcatcaaag

SEQ ID NO: 2455 - DNA, 107 bp, Artificial Sequence; identical to SEQ ID NO: 1337
  scaffold variant

SEQ ID NO: 2456 - DNA, 107 bp, Artificial Sequence; identical to SEQ ID NO: 1691
  scaffold variant

SEQ ID NO: 2457 - DNA, 109 bp, Artificial Sequence; identical to SEQ ID NO: 1555
  scaffold variant

SEQ ID NO: 2458 - DNA, 106 bp, Artificial Sequence; identical to SEQ ID NO: 1934
  scaffold variant

SEQ ID NO: 2459 - DNA, 108 bp, Artificial Sequence
  scaffold variant
tactggcgcttttatctattactttgagagccatcaccagcgactatgtcgtatgggtaaagcgcttatttatcgagagagaaatccgataaataagaagcatcaaag

SEQ ID NO: 2460 - DNA, 109 bp, Artificial Sequence
  scaffold variant
tctggcgcttttattctcattactttgagagccatcaccagcgactatgtcgtatgggtaaagcgcttatttatgcggagagaaatccgataaataagaagcatcaaag

SEQ ID NO: 2461 - DNA, 109 bp, Artificial Sequence; identical to SEQ ID NO: 740
  scaffold variant

SEQ ID NO: 2462 - DNA, 107 bp, Artificial Sequence; identical to SEQ ID NO: 1678
  scaffold variant

SEQ ID NO: 2463 - DNA, 109 bp, Artificial Sequence; identical to SEQ ID NO: 802
  scaffold variant

SEQ ID NO: 2464 - DNA, 107 bp, Artificial Sequence; identical to SEQ ID NO: 1218
  scaffold variant

SEQ ID NO: 2465 - DNA, 110 bp, Artificial Sequence
  scaffold variant
tactggcgcttttatctcattactttgagagccatcaccagcgactatgtcgtatgggtaaagcgcttatttattcggagagaaatcacgataaataagaagcatcaaag

SEQ ID NO: 2466 - DNA, 109 bp, Artificial Sequence; identical to SEQ ID NO: 740
  scaffold variant

SEQ ID NO: 2467 - DNA, 109 bp, Artificial Sequence; identical to SEQ ID NO: 740
  scaffold variant

SEQ ID NO: 2468 - DNA, 109 bp, Artificial Sequence; identical to SEQ ID NO: 980
  scaffold variant

SEQ ID NO: 2469 - DNA, 107 bp, Artificial Sequence; identical to SEQ ID NO: 1915
  scaffold variant

SEQ ID NO: 2470 - DNA, 108 bp, Artificial Sequence; identical to SEQ ID NO: 377
  scaffold variant

SEQ ID NO: 2471 - DNA, 107 bp, Artificial Sequence; identical to SEQ ID NO: 972
  scaffold variant

SEQ ID NO: 2472 - DNA, 110 bp, Artificial Sequence
  scaffold variant
ttactggcgcttttatctcattactttgagagccatcaccagcgactatgtcgtatgggtaaagcgcttatttatcggagagaaatcccgataaataagaagcatcaaag

SEQ ID NO: 2473 - DNA, 107 bp, Artificial Sequence; identical to SEQ ID NO: 1707
  scaffold variant

SEQ ID NO: 2474 - DNA, 109 bp, Artificial Sequence; identical to SEQ ID NO: 1010
  scaffold variant

SEQ ID NO: 2475 - DNA, 107 bp, Artificial Sequence; identical to SEQ ID NO: 1464
  scaffold variant

SEQ ID NO: 2476 - DNA, 109 bp, Artificial Sequence; identical to SEQ ID NO: 941
  scaffold variant

SEQ ID NO: 2477 - DNA, 108 bp, Artificial Sequence
  scaffold variant
tactggcgcttttatcctcattactttgagagccatcaccagcgactatgtcgtatgggtaaagcgcttatttatcggagagaaatagataaataagaagcatcaaag

SEQ ID NO: 2478 - DNA, 108 bp, Artificial Sequence; identical to SEQ ID NO: 1234
  scaffold variant

SEQ ID NO: 2479 - DNA, 109 bp, Artificial Sequence; identical to SEQ ID NO: 912
  scaffold variant

SEQ ID NO: 2480 - DNA, 106 bp, Artificial Sequence; identical to SEQ ID NO: 1934
  scaffold variant

SEQ ID NO: 2481 - DNA, 109 bp, Artificial Sequence; identical to SEQ ID NO: 802
  scaffold variant

SEQ ID NO: 2482 - DNA, 108 bp, Artificial Sequence
  scaffold variant
tactggcgcttttatctcattactttgagagccatcaccagcgactatgtcgtatgggtaaagcgcttatttatcgagagaaatctcgataaataagaagcatcaaag

SEQ ID NO: 2483 - DNA, 110 bp, Artificial Sequence
  scaffold variant
tactggcgcttttatctcattactttgagagccatcaccagcgactatgtcgtatgggtaaagcgcttatttaatcggagagaaatcccgataaataagaagcatcaaag

SEQ ID NO: 2484 - DNA, 107 bp, Artificial Sequence; identical to SEQ ID NO: 1097
  scaffold variant

SEQ ID NO: 2485 - DNA, 107 bp, Artificial Sequence
  scaffold variant
tactggcgcttttatctcattactttgagagccatcaccagcgactatgtcgtatgggtaaagcgcttatttatctcgagaaatccgataaataagaagcatcaaag

SEQ ID NO: 2486 - DNA, 107 bp, Artificial Sequence
  scaffold variant
ctggcgcttttatctgcattactttgagagccatcaccagcgactatgtcgtatgggtaaagcgcttatttatcggagagaaatccgataaataagaagcatcaaag

SEQ ID NO: 2487 - DNA, 107 bp, Artificial Sequence; identical to SEQ ID NO: 915
  scaffold variant

SEQ ID NO: 2488 - DNA, 110 bp, Artificial Sequence
  scaffold variant
tactggcgcttttatcctcattactttgagagccatcaccagcgactatgtcgtatgggtaaagcgcttatttatcggagagaaatccgtataaataagaagcatcaaag

SEQ ID NO: 2489 - DNA, 107 bp, Artificial Sequence
  scaffold variant
tactggcgcttttatctcattactttgagagccatcaccagcgactatgtcgtatgggtaaagcgcttatttatcggagagaaaaagataaataagaagcatcaaag

SEQ ID NO: 2490 - DNA, 107 bp, Artificial Sequence; identical to SEQ ID NO: 1218
  scaffold variant

SEQ ID NO: 2491 - DNA, 106 bp, Artificial Sequence; identical to SEQ ID NO: 762
  scaffold variant

SEQ ID NO: 2492 - DNA, 107 bp, Artificial Sequence; identical to SEQ ID NO: 1036
  scaffold variant

SEQ ID NO: 2493 - DNA, 108 bp, Artificial Sequence; identical to SEQ ID NO: 377
  scaffold variant

SEQ ID NO: 2494 - DNA, 109 bp, Artificial Sequence; identical to SEQ ID NO: 1786
  scaffold variant

SEQ ID NO: 2495 - DNA, 107 bp, Artificial Sequence
  scaffold variant
atggcgcttttatctcattactttgagagccatcaccagcgactatgtcgtatgggtaaagcgcttatttatcggagagaaataccgataaataagaagcatcaaag

SEQ ID NO: 2496 - DNA, 106 bp, Artificial Sequence
  scaffold variant
tactggcgcttttatctcattactttgagagccatcaccagcgactatgtcgtatgggtaaagcgcttatttacggagagaaatcgataaataagaagcatcaaag

SEQ ID NO: 2497 - DNA, 106 bp, Artificial Sequence
  scaffold variant
gctggcgcttttatctcattactttgagagccatcaccagcgactatgtcgtatgggtaaagcgcttatttatcggaggaaatccgataaataagaagcatcaaag

SEQ ID NO: 2498 - DNA, 105 bp, Artificial Sequence; identical to SEQ ID NO: 512
  scaffold variant

SEQ ID NO: 2499 - DNA, 107 bp, Artificial Sequence; identical to SEQ ID NO: 1097
  scaffold variant

SEQ ID NO: 2500 - DNA, 109 bp, Artificial Sequence; identical to SEQ ID NO: 910
  scaffold variant

SEQ ID NO: 2501 - DNA, 107 bp, Artificial Sequence; identical to SEQ ID NO: 1691
  scaffold variant

SEQ ID NO: 2502 - DNA, 109 bp, Artificial Sequence; identical to SEQ ID NO: 948
  scaffold variant

SEQ ID NO: 2503 - DNA, 109 bp, Artificial Sequence; identical to SEQ ID NO: 1048
  scaffold variant

SEQ ID NO: 2504 - DNA, 107 bp, Artificial Sequence; identical to SEQ ID NO: 1707
  scaffold variant

SEQ ID NO: 2505 - DNA, 109 bp, Artificial Sequence; identical to SEQ ID NO: 1145
  scaffold variant

SEQ ID NO: 2506 - DNA, 107 bp, Artificial Sequence; identical to SEQ ID NO: 1691
  scaffold variant

SEQ ID NO: 2507 - DNA, 106 bp, Artificial Sequence
  scaffold variant
tctggcgcttttattcattactttgagagccatcaccagcgactatgtcgtatgggtaaagcgcttatttatcggagagaaatccgataaataagaagcatcaaag

SEQ ID NO: 2508 - DNA, 107 bp, Artificial Sequence
  scaffold variant
tactggcgcttttatcttattactttgagagccatcaccagcgactatgtcgtatgggtaaagcgcttatttatcgagagaaatccgataaataagaagcatcaaag

SEQ ID NO: 2509 - DNA, 107 bp, Artificial Sequence; identical to SEQ ID NO: 1091
  scaffold variant

SEQ ID NO: 2510 - DNA, 106 bp, Artificial Sequence
  scaffold variant
tactggcgcttttatctcattactttgagagccatcaccagcgactatgtcgtatgggtaaagcggtatttatcggagagtatccgataaataagaagcatcaaag

SEQ ID NO: 2511 - DNA, 106 bp, Artificial Sequence
  scaffold variant
gctggcgcttttatctcattactttgagagccatcaccagcgactatgtcgtatgggtaaagcgcttatttatcggagagcatccgataaataagaagcatcaaag

SEQ ID NO: 2512 - DNA, 107 bp, Artificial Sequence
  scaffold variant
tctggcgcttttattctcattactttgagagccatcaccagcgactatgtcgtatgggtaaagcgcttatttatcgagagaaatccgataaataagaagcatcaaag

SEQ ID NO: 2513 - DNA, 108 bp, Artificial Sequence
  scaffold variant
tactggcgcttttatctcattactttgagagccatcaccagcgactatgtcgtatgggtaaagcgcttatttatcgggagagaaatcgataaataagaagcatcaaag

SEQ ID NO: 2514 - DNA, 106 bp, Artificial Sequence; identical to SEQ ID NO: 862
  scaffold variant

SEQ ID NO: 2515 - DNA, 107 bp, Artificial Sequence; identical to SEQ ID NO: 833
  scaffold variant

SEQ ID NO: 2516 - DNA, 107 bp, Artificial Sequence; identical to SEQ ID NO: 1915
  scaffold variant

SEQ ID NO: 2517 - DNA, 107 bp, Artificial Sequence; identical to SEQ ID NO: 1915
  scaffold variant

SEQ ID NO: 2518 - DNA, 106 bp, Artificial Sequence
  scaffold variant
tactggcgcttttatctcattactttgagagccatcaccagcgactatgtcgtatgggtaaagcgcttattttcggagagaaatccataaataagaagcatcaaag

SEQ ID NO: 2519 - DNA, 109 bp, Artificial Sequence; identical to SEQ ID NO: 740
  scaffold variant

SEQ ID NO: 2520 - DNA, 107 bp, Artificial Sequence; identical to SEQ ID NO: 1691
  scaffold variant

SEQ ID NO: 2521 - DNA, 107 bp, Artificial Sequence; identical to SEQ ID NO: 990
  scaffold variant

SEQ ID NO: 2522 - DNA, 107 bp, Artificial Sequence; identical to SEQ ID NO: 1915
  scaffold variant

SEQ ID NO: 2523 - DNA, 109 bp, Artificial Sequence; identical to SEQ ID NO: 912
  scaffold variant

SEQ ID NO: 2524 - DNA, 109 bp, Artificial Sequence; identical to SEQ ID NO: 1177
  scaffold variant

SEQ ID NO: 2525 - DNA, 106 bp, Artificial Sequence; identical to SEQ ID NO: 618
  scaffold variant

SEQ ID NO: 2526 - DNA, 109 bp, Artificial Sequence; identical to SEQ ID NO: 1183
  scaffold variant

SEQ ID NO: 2527 - DNA, 106 bp, Artificial Sequence; identical to SEQ ID NO: 459
  scaffold variant

SEQ ID NO: 2528 - DNA, 107 bp, Artificial Sequence; identical to SEQ ID NO: 1218
  scaffold variant

SEQ ID NO: 2529 - DNA, 106 bp, Artificial Sequence; identical to SEQ ID NO: 737
  scaffold variant

SEQ ID NO: 2530 - DNA, 106 bp, Artificial Sequence
  scaffold variant
tactggcgcttttatctcattactttgagagccatcaccagcgactatgtcgtatgggtaaagcggtatttatcggaggaaatccgataaataagaagcatcaaag

SEQ ID NO: 2531 - DNA, 106 bp, Artificial Sequence; identical to SEQ ID NO: 1784
  scaffold variant

SEQ ID NO: 2532 - DNA, 107 bp, Artificial Sequence; identical to SEQ ID NO: 1426
  scaffold variant

SEQ ID NO: 2533 - DNA, 107 bp, Artificial Sequence; identical to SEQ ID NO: 1097
  scaffold variant

SEQ ID NO: 2534 - DNA, 108 bp, Artificial Sequence
  scaffold variant
tactggcgcttttatcctcattactttgagagccatcaccagcgactatgtcgtatgggtaaagcgcttatttatcggagaaaatccgataaataagaagcatcaaag

SEQ ID NO: 2535 - DNA, 107 bp, Artificial Sequence; identical to SEQ ID NO: 1262
  scaffold variant

SEQ ID NO: 2536 - DNA, 107 bp, Artificial Sequence; identical to SEQ ID NO: 972
  scaffold variant

SEQ ID NO: 2537 - DNA, 108 bp, Artificial Sequence
  scaffold variant
tactggcgcttttatctcattactttgagagccatcaccagcgactatgtcgtatgggtaaagcgcttattttcggagagaaatcacgataaataagaagcatcaaag

SEQ ID NO: 2538 - DNA, 108 bp, Artificial Sequence
  scaffold variant
tactggcgcttttatctcattactttgagagccatcaccagcgactatgtcgtatgggtaaagcgatatttatcgggagagaaatccgataaataagaagcatcaaag

SEQ ID NO: 2539 - DNA, 108 bp, Artificial Sequence
  scaffold variant
tactggcgcttttatctctattactttgagagccatcaccagcgactatgtcgtatgggtaaagcgcttatttccggagagaaatccgataaataagaagcatcaaag

SEQ ID NO: 2540 - DNA, 109 bp, Artificial Sequence; identical to SEQ ID NO: 837
  scaffold variant

SEQ ID NO: 2541 - DNA, 107 bp, Artificial Sequence; identical to SEQ ID NO: 1915
  scaffold variant

SEQ ID NO: 2542 - DNA, 110 bp, Artificial Sequence
  scaffold variant
tactggcgcttttattctcattactttgagagccatcaccagcgactatgtcgtatgggtaaagcgcttatcttatcggagagaaatccgataaataagaagcatcaaag

SEQ ID NO: 2543 - DNA, 106 bp, Artificial Sequence
  scaffold variant
tctggcgcttttatctattactttgagagccatcaccagcgactatgtcgtatgggtaaagcgcttatttatcggagagaaatccgataaataagaagcatcaaag

SEQ ID NO: 2544 - DNA, 109 bp, Artificial Sequence; identical to SEQ ID NO: 947
  scaffold variant

SEQ ID NO: 2545 - DNA, 109 bp, Artificial Sequence; identical to SEQ ID NO: 518
  scaffold variant

SEQ ID NO: 2546 - DNA, 107 bp, Artificial Sequence; identical to SEQ ID NO: 1262
  scaffold variant

SEQ ID NO: 2547 - DNA, 107 bp, Artificial Sequence; identical to SEQ ID NO: 1262
  scaffold variant

SEQ ID NO: 2548 - DNA, 107 bp, Artificial Sequence; identical to SEQ ID NO: 1915
  scaffold variant

SEQ ID NO: 2549 - DNA, 110 bp, Artificial Sequence
  scaffold variant
ctactggcgcttttatctcattactttgagagccatcaccagcgactatgtcgtatgggtaaagcgcttatttactcggagagaaatccgataaataagaagcatcaaag

SEQ ID NO: 2550 - DNA, 109 bp, Artificial Sequence
  scaffold variant
tactggcgcctttatctcattactttgagagccatcaccagcgactatgtcgtatgggtaaagcgcttatttatcggagagaaatcgcgataaataagaagcatcaaag

SEQ ID NO: 2551 - DNA, 106 bp, Artificial Sequence; identical to SEQ ID NO: 459
  scaffold variant

SEQ ID NO: 2552 - DNA, 109 bp, Artificial Sequence; identical to SEQ ID NO: 1048
  scaffold variant

SEQ ID NO: 2553 - DNA, 106 bp, Artificial Sequence; identical to SEQ ID NO: 1934
  scaffold variant

SEQ ID NO: 2554 - DNA, 108 bp, Artificial Sequence
  scaffold variant
tactggcgcttttatctcattactttgagagccatcaccagcgactatgtcgtatgggtaaagcgcttattctatcggagagaatccgataaataagaagcatcaaag

SEQ ID NO: 2555 - DNA, 110 bp, Artificial Sequence
  scaffold variant
atactggcgcttttatctcattactttgagagccatcaccagcgactatgtcgtatgggtaaagcgcttatttatcggcagagaaatccgataaataagaagcatcaaag

SEQ ID NO: 2556 - DNA, 108 bp, Artificial Sequence
  scaffold variant
tactggcgcttttatctcattactttgagagccatcaccagcgactatgtcgtatgggtaaagcgcttatttatacggagagaatccgataaataagaagcatcaaag

SEQ ID NO: 2557 - DNA, 108 bp, Artificial Sequence; identical to SEQ ID NO: 405
  scaffold variant

SEQ ID NO: 2558 - DNA, 107 bp, Artificial Sequence; identical to SEQ ID NO: 915
  scaffold variant

SEQ ID NO: 2559 - DNA, 108 bp, Artificial Sequence
  scaffold variant
tactggcgcttttatctcattactttgagagccatcaccagcgactatgtcgtatgggtaaagcgcttatttatgcggagagaaatccgatgataagaagcatcaaag

SEQ ID NO: 2560 - DNA, 107 bp, Artificial Sequence; identical to SEQ ID NO: 1464
  scaffold variant

SEQ ID NO: 2561 - DNA, 108 bp, Artificial Sequence
  scaffold variant
tactggcgcttttatcctcattactttgagagccatcaccagcgactatgtcgtatgggtaaagcgcttatttatcgtgagaaatccgataaataagaagcatcaaag

SEQ ID NO: 2562 - DNA, 107 bp, Artificial Sequence; identical to SEQ ID NO: 1036
  scaffold variant

SEQ ID NO: 2563 - DNA, 107 bp, Artificial Sequence
  scaffold variant
tactggcgcttttatctcattactttgagagccatcaccagcgactatgtcgtatgggtaaagcgcttatttatcggtagaaatccgataaataagaagcatcaaag

SEQ ID NO: 2564 - DNA, 107 bp, Artificial Sequence; identical to SEQ ID NO: 1097
  scaffold variant

SEQ ID NO: 2565 - DNA, 107 bp, Artificial Sequence; identical to SEQ ID NO: 1707
  scaffold variant

SEQ ID NO: 2566 - DNA, 108 bp, Artificial Sequence
  scaffold variant
tctggcgcttttatcatcattactttgagagccatcaccagcgactatgtcgtatgggtaaagcgcttatttatcggagagaaatccgataaataagaagcatcaaag

SEQ ID NO: 2567 - DNA, 109 bp, Artificial Sequence; identical to SEQ ID NO: 980
  scaffold variant

SEQ ID NO: 2568 - DNA, 107 bp, Artificial Sequence; identical to SEQ ID NO: 1012
  scaffold variant

SEQ ID NO: 2569 - DNA, 110 bp, Artificial Sequence
  scaffold variant
tactggcgcttttatcatcattactttgagagccatcaccagcgactatgtcgtatgggtaaagcgcttatttatcggcagagaaatccgataaataagaagcatcaaag

SEQ ID NO: 2570 - DNA, 107 bp, Artificial Sequence; identical to SEQ ID NO: 1036
  scaffold variant

SEQ ID NO: 2571 - DNA, 107 bp, Artificial Sequence; identical to SEQ ID NO: 915
  scaffold variant

SEQ ID NO: 2572 - DNA, 109 bp, Artificial Sequence
  scaffold variant
tactggcgcttttatctcattactttgagagccatcaccagcgactatgtcgtatgggtaaagcgcttattatatcggagagaaatccgataaataagaagcatcaaag

SEQ ID NO: 2573 - DNA, 107 bp, Artificial Sequence; identical to SEQ ID NO: 1337
  scaffold variant

SEQ ID NO: 2574 - DNA, 107 bp, Artificial Sequence; identical to SEQ ID NO: 1426
  scaffold variant

SEQ ID NO: 2575 - DNA, 106 bp, Artificial Sequence
  scaffold variant
tactggcgcttttatctcattactttgagagccatcaccagcgactatgtcgtatgggtaaagcggtatttatcggagagaaatccgtaaataagaagcatcaaag

SEQ ID NO: 2576 - DNA, 110 bp, Artificial Sequence
  scaffold variant
ctactggcgcttttatctcattactttgagagccatcaccagcgactatgtcgtatgggtaaagcgcttatttatcgcgagagaaatccgataaataagaagcatcaaag

SEQ ID NO: 2577 - DNA, 107 bp, Artificial Sequence; identical to SEQ ID NO: 833
  scaffold variant

SEQ ID NO: 2578 - DNA, 109 bp, Artificial Sequence; identical to SEQ ID NO: 518
  scaffold variant

SEQ ID NO: 2579 - DNA, 110 bp, Artificial Sequence
  scaffold variant
tactggcgcttttatctcattactttgagagccatcaccagcgactatgtcgtatgggtaaagcgcttatttattcggagagaaatctcgataaataagaagcatcaaag

SEQ ID NO: 2580 - DNA, 110 bp, Artificial Sequence
  scaffold variant
tactggcgcttttatcctcattactttgagagccatcaccagcgactatgtcgtatgggtaaagcgcttatttatcggagagaaatccgataaataagagagcatcaaag

SEQ ID NO: 2581 - DNA, 108 bp, Artificial Sequence; identical to SEQ ID NO: 405
  scaffold variant

SEQ ID NO: 2582 - DNA, 109 bp, Artificial Sequence; identical to SEQ ID NO: 980
  scaffold variant

SEQ ID NO: 2583 - DNA, 107 bp, Artificial Sequence; identical to SEQ ID NO: 833
  scaffold variant

SEQ ID NO: 2584 - DNA, 106 bp, Artificial Sequence
  scaffold variant
ctggcgcttttatcccattactttgagagccatcaccagcgactatgtcgtatgggtaaagcgcttatttatcggagagaaatccgataaataagaagcatcaaag

SEQ ID NO: 2585 - DNA, 109 bp, Artificial Sequence; identical to SEQ ID NO: 518
  scaffold variant

SEQ ID NO: 2586 - DNA, 107 bp, Artificial Sequence; identical to SEQ ID NO: 1036
  scaffold variant

SEQ ID NO: 2587 - DNA, 106 bp, Artificial Sequence; identical to SEQ ID NO: 1934
  scaffold variant

SEQ ID NO: 2588 - DNA, 109 bp, Artificial Sequence; identical to SEQ ID NO: 1555
  scaffold variant

SEQ ID NO: 2589 - DNA, 109 bp, Artificial Sequence
  scaffold variant
tactggcgcttttatctaattactttgagagccatcaccagcgactatgtcgtatgggtaaagcgcttatttatccggagagaaatccgataaataagaagcatcaaag

SEQ ID NO: 2590 - DNA, 107 bp, Artificial Sequence; identical to SEQ ID NO: 972
  scaffold variant

SEQ ID NO: 2591 - DNA, 107 bp, Artificial Sequence; identical to SEQ ID NO: 1262
  scaffold variant

SEQ ID NO: 2592 - DNA, 107 bp, Artificial Sequence; identical to SEQ ID NO: 1915
  scaffold variant

SEQ ID NO: 2593 - DNA, 106 bp, Artificial Sequence
  scaffold variant
actggcgcttttatctcattactttgagagccatcaccagcgactatgtcgtatgggtaaagcgcttatttatcggagacaatccgataaataagaagcatcaaag

SEQ ID NO: 2594 - DNA, 107 bp, Artificial Sequence; identical to SEQ ID NO: 1262
  scaffold variant

SEQ ID NO: 2595 - DNA, 107 bp, Artificial Sequence; identical to SEQ ID NO: 1262
  scaffold variant

SEQ ID NO: 2596 - DNA, 109 bp, Artificial Sequence; identical to SEQ ID NO: 980
  scaffold variant

SEQ ID NO: 2597 - DNA, 107 bp, Artificial Sequence; identical to SEQ ID NO: 925
  scaffold variant

SEQ ID NO: 2598 - DNA, 107 bp, Artificial Sequence; identical to SEQ ID NO: 1678
  scaffold variant

SEQ ID NO: 2599 - DNA, 107 bp, Artificial Sequence; identical to SEQ ID NO: 1337
  scaffold variant

SEQ ID NO: 2600 - DNA, 107 bp, Artificial Sequence; identical to SEQ ID NO: 915
  scaffold variant

SEQ ID NO: 2601 - DNA, 109 bp, Artificial Sequence; identical to SEQ ID NO: 947
  scaffold variant

SEQ ID NO: 2602 - DNA, 109 bp, Artificial Sequence; identical to SEQ ID NO: 740
  scaffold variant

SEQ ID NO: 2603 - DNA, 107 bp, Artificial Sequence; identical to SEQ ID NO: 1218
  scaffold variant

SEQ ID NO: 2604 - DNA, 107 bp, Artificial Sequence; identical to SEQ ID NO: 1091
  scaffold variant

SEQ ID NO: 2605 - DNA, 105 bp, Artificial Sequence; identical to SEQ ID NO: 390
  scaffold variant

SEQ ID NO: 2606 - DNA, 108 bp, Artificial Sequence; identical to SEQ ID NO: 849
  scaffold variant

SEQ ID NO: 2607 - DNA, 107 bp, Artificial Sequence; identical to SEQ ID NO: 972
  scaffold variant

SEQ ID NO: 2608 - DNA, 108 bp, Artificial Sequence; identical to SEQ ID NO: 769
  scaffold variant

SEQ ID NO: 2609 - DNA, 109 bp, Artificial Sequence; identical to SEQ ID NO: 980
  scaffold variant

SEQ ID NO: 2610 - DNA, 108 bp, Artificial Sequence; identical to SEQ ID NO: 442
  scaffold variant

SEQ ID NO: 2611 - DNA, 109 bp, Artificial Sequence
  scaffold variant
cactggcgcttttatctcattactttgagagccatcaccagcgactatgtcgtatgggtaaagcgcttatttatcgggagagaaatccgataaataagaagcatcaaag

SEQ ID NO: 2612 - DNA, 108 bp, Artificial Sequence
  scaffold variant
tactggcgcttttatctcattactttgagagccatcaccagcgactatgtcgtatgggtaaagcgcttattttcggagagaaatccgataaataagaaagcatcaaag

SEQ ID NO: 2613 - DNA, 109 bp, Artificial Sequence; identical to SEQ ID NO: 1786
  scaffold variant

SEQ ID NO: 2614 - DNA, 107 bp, Artificial Sequence; identical to SEQ ID NO: 1915
  scaffold variant

SEQ ID NO: 2615 - DNA, 107 bp, Artificial Sequence; identical to SEQ ID NO: 990
  scaffold variant

SEQ ID NO: 2616 - DNA, 106 bp, Artificial Sequence
  scaffold variant
gatggcgcttttatctcattactttgagagccatcaccagcgactatgtcgtatgggtaaagcgcttatttacggagagaaatccgataaataagaagcatcaaag

SEQ ID NO: 2617 - DNA, 108 bp, Artificial Sequence
  scaffold variant
taactggcgcttttatctcattactttgagagccatcaccagcgactatgtcgtatgggtaaagcgcttatttatctagagaaatccgataaataagaagcatcaaag

SEQ ID NO: 2618 - DNA, 108 bp, Artificial Sequence
  scaffold variant
tactggcgcttttatctcattactttgagagccatcaccagcgactatgtcgtatgggtaaagcgcttatttattcggagagtatccgataaataagaagcatcaaag

SEQ ID NO: 2619 - DNA, 110 bp, Artificial Sequence
  scaffold variant
tactggcgcttttatctcattactttgagagccatcaccagcgactatgtcgtatgggtaaagcgcttatttagtcggagagaaatccgaataaataagaagcatcaaag

SEQ ID NO: 2620 - DNA, 107 bp, Artificial Sequence; identical to SEQ ID NO: 915
  scaffold variant

SEQ ID NO: 2621 - DNA, 108 bp, Artificial Sequence
  scaffold variant
tactggcgcttttatctcattactttgagagccatcaccagcgactatgtcgtatgggtaaagcgcttatttatctggagagaaatcgataaataagaagcatcaaag

SEQ ID NO: 2622 - DNA, 107 bp, Artificial Sequence; identical to SEQ ID NO: 2413
  scaffold variant

SEQ ID NO: 2623 - DNA, 107 bp, Artificial Sequence; identical to SEQ ID NO: 990
  scaffold variant

SEQ ID NO: 2624 - DNA, 109 bp, Artificial Sequence; identical to SEQ ID NO: 1048
  scaffold variant

SEQ ID NO: 2625 - DNA, 107 bp, Artificial Sequence
  scaffold variant
cctggcgcttttatctcattactttgagagccatcaccagcgactatgtcgtatgggtaaagcgcttatttataggagagaaatccgataaataagaagcatcaaag

SEQ ID NO: 2626 - DNA, 109 bp, Artificial Sequence
  scaffold variant
tactggcgcttttatctcattactttgagagccatcaccagcgactatgtcgtatgggtaaagcgcttatttatgcggagagaaatccggtaaataagaagcatcaaag

SEQ ID NO: 2627 - DNA, 109 bp, Artificial Sequence; identical to SEQ ID NO: 1145
  scaffold variant

SEQ ID NO: 2628 - DNA, 109 bp, Artificial Sequence; identical to SEQ ID NO: 912
  scaffold variant

SEQ ID NO: 2629 - DNA, 109 bp, Artificial Sequence; identical to SEQ ID NO: 1555
  scaffold variant

SEQ ID NO: 2630 - DNA, 107 bp, Artificial Sequence; identical to SEQ ID NO: 1218
  scaffold variant

SEQ ID NO: 2631 - DNA, 107 bp, Artificial Sequence
  scaffold variant
tactggcgcttttatcttcattactttgagagccatcaccagcgactatgtcgtatgggtaaagcgcttatttatcggggaaatccgataaataagaagcatcaaag

SEQ ID NO: 2632 - DNA, 109 bp, Artificial Sequence; identical to SEQ ID NO: 1010
  scaffold variant

SEQ ID NO: 2633 - DNA, 108 bp, Artificial Sequence; identical to SEQ ID NO: 573
  scaffold variant

SEQ ID NO: 2634 - DNA, 110 bp, Artificial Sequence
  scaffold variant
ctactggcgcttttatctcattactttgagagccatcaccagcgactatgtcgtatgggtaaagcgcttatttatcgagagagaaatccgataaataagaagcatcaaag

SEQ ID NO: 2635 - DNA, 108 bp, Artificial Sequence; identical to SEQ ID NO: 490
  scaffold variant

SEQ ID NO: 2636 - DNA, 107 bp, Artificial Sequence; identical to SEQ ID NO: 1844
  scaffold variant

SEQ ID NO: 2637 - DNA, 107 bp, Artificial Sequence; identical to SEQ ID NO: 833
  scaffold variant

SEQ ID NO: 2638 - DNA, 107 bp, Artificial Sequence; identical to SEQ ID NO: 1757
  scaffold variant

SEQ ID NO: 2639 - DNA, 109 bp, Artificial Sequence; identical to SEQ ID NO: 1017
  scaffold variant

SEQ ID NO: 2640 - DNA, 106 bp, Artificial Sequence; identical to SEQ ID NO: 371
  scaffold variant

SEQ ID NO: 2641 - DNA, 106 bp, Artificial Sequence; identical to SEQ ID NO: 463
  scaffold variant

SEQ ID NO: 2642 - DNA, 107 bp, Artificial Sequence; identical to SEQ ID NO: 1097
  scaffold variant

SEQ ID NO: 2643 - DNA, 107 bp, Artificial Sequence; identical to SEQ ID NO: 1262
  scaffold variant

SEQ ID NO: 2644 - DNA, 106 bp, Artificial Sequence
  scaffold variant
tctggcgcttttatctcattactttgagagccatcaccagcgactatgtcgtatgggtaaagcgcttatttatcggagagattccgataaataagaagcatcaaag

SEQ ID NO: 2645 - DNA, 109 bp, Artificial Sequence
  scaffold variant
tactggcgcttttatctcattactttgagagccatcaccagcgactatgtcgtatgggtaaagcgcttatttatcgggagggaaatccgataaataagaagcatcaaag

SEQ ID NO: 2646 - DNA, 106 bp, Artificial Sequence; identical to SEQ ID NO: 1934
  scaffold variant

SEQ ID NO: 2647 - DNA, 110 bp, Artificial Sequence
  scaffold variant
tactggcgcttttatctcattactttgagagccatcaccagcgactatgtcgtatgggtaaagcgcttattgtatcggagagaaatcgcgataaataagaagcatcaaag

SEQ ID NO: 2648 - DNA, 107 bp, Artificial Sequence; identical to SEQ ID NO: 1678
  scaffold variant

SEQ ID NO: 2649 - DNA, 109 bp, Artificial Sequence; identical to SEQ ID NO: 912
  scaffold variant

SEQ ID NO: 2650 - DNA, 108 bp, Artificial Sequence
  scaffold variant
ttactggcgcttttatctcattactttgagagccatcaccagcgactatgtcgtatgggtaaagcgcttatttgcggagagaaatccgataaataagaagcatcaaag

SEQ ID NO: 2651 - DNA, 107 bp, Artificial Sequence
  scaffold variant
tacggcgcttttatctcattactttgagagccatcaccagcgactatgtcgtatgggtaaagcgcttatctatcggagagaaatccgataaataagaagcatcaaag

SEQ ID NO: 2652 - DNA, 107 bp, Artificial Sequence; identical to SEQ ID NO: 1882
  scaffold variant

SEQ ID NO: 2653 - DNA, 107 bp, Artificial Sequence; identical to SEQ ID NO: 1036
  scaffold variant

SEQ ID NO: 2654 - DNA, 107 bp, Artificial Sequence; identical to SEQ ID NO: 1844
  scaffold variant

SEQ ID NO: 2655 - DNA, 108 bp, Artificial Sequence
  scaffold variant
tactggcgcttttatctcattactttgagagccatcaccagcgactatgtcgtatgggtaaagcgcttatttatcaagagaaatccgataaataagaaagcatcaaag

SEQ ID NO: 2656 - DNA, 107 bp, Artificial Sequence; identical to SEQ ID NO: 833
  scaffold variant

SEQ ID NO: 2657 - DNA, 110 bp, Artificial Sequence
  scaffold variant
tactggcgcttttatctcattactttgagagccatcaccagcgactatgtcgtatgggtaaagcgcttatttatccggagagaaatgccgataaataagaagcatcaaag

SEQ ID NO: 2658 - DNA, 108 bp, Artificial Sequence; identical to SEQ ID NO: 769
  scaffold variant

SEQ ID NO: 2659 - DNA, 109 bp, Artificial Sequence; identical to SEQ ID NO: 912
  scaffold variant

SEQ ID NO: 2660 - DNA, 109 bp, Artificial Sequence; identical to SEQ ID NO: 1183
  scaffold variant

SEQ ID NO: 2661 - DNA, 107 bp, Artificial Sequence
  scaffold variant
cctggcgcttttatctcattactttgagagccatcaccagcgactatgtcgtatgggtaaagctcttatttatcggagagaaatccgataaataagaagcatcaaag

SEQ ID NO: 2662 - DNA, 109 bp, Artificial Sequence; identical to SEQ ID NO: 802
  scaffold variant

SEQ ID NO: 2663 - DNA, 107 bp, Artificial Sequence; identical to SEQ ID NO: 1091
  scaffold variant

SEQ ID NO: 2664 - DNA, 110 bp, Artificial Sequence
  scaffold variant
tactggcgcttttatctcattactttgagagccatcaccagcgactatgtcgtatgggtaaagcgcttattctatcggagagaaatcgcgataaataagaagcatcaaag

SEQ ID NO: 2665 - DNA, 107 bp, Artificial Sequence; identical to SEQ ID NO: 1262
  scaffold variant

SEQ ID NO: 2666 - DNA, 109 bp, Artificial Sequence
  scaffold variant
tactggcgcttttatctcattactttgagagccatcaccagcgactatgtcgtatgggtaaagcgcttattttatcggagagaaatccgataaataagaagcatcaaag

SEQ ID NO: 2667 - DNA, 106 bp, Artificial Sequence; identical to SEQ ID NO: 385
  scaffold variant

SEQ ID NO: 2668 - DNA, 109 bp, Artificial Sequence; identical to SEQ ID NO: 740
  scaffold variant

SEQ ID NO: 2669 - DNA, 104 bp, Artificial Sequence
  scaffold variant
atggcgcttttatctcattactttgagagccatcaccagcgactatgtcgtatgggtaaagcgcttatttatcggagagatccgataaataagaagcatcaaag

SEQ ID NO: 2670 - DNA, 106 bp, Artificial Sequence; identical to SEQ ID NO: 1784
  scaffold variant

SEQ ID NO: 2671 - DNA, 107 bp, Artificial Sequence; identical to SEQ ID NO: 1757
  scaffold variant

SEQ ID NO: 2672 - DNA, 109 bp, Artificial Sequence; identical to SEQ ID NO: 1119
  scaffold variant

SEQ ID NO: 2673 - DNA, 107 bp, Artificial Sequence; identical to SEQ ID NO: 972
  scaffold variant

SEQ ID NO: 2674 - DNA, 109 bp, Artificial Sequence; identical to SEQ ID NO: 802
  scaffold variant

SEQ ID NO: 2675 - DNA, 110 bp, Artificial Sequence
  scaffold variant
tactggcgcttttatctcattactttgagagccatcaccagcgactatgtcgtatgggtaaagcgcttatttatctggagagaaatcccgataaataagaagcatcaaag

SEQ ID NO: 2676 - DNA, 107 bp, Artificial Sequence; identical to SEQ ID NO: 972
  scaffold variant

SEQ ID NO: 2677 - DNA, 107 bp, Artificial Sequence; identical to SEQ ID NO: 1707
  scaffold variant

SEQ ID NO: 2678 - DNA, 109 bp, Artificial Sequence; identical to SEQ ID NO: 1555
  scaffold variant

SEQ ID NO: 2679 - DNA, 109 bp, Artificial Sequence; identical to SEQ ID NO: 802
  scaffold variant

SEQ ID NO: 2680 - DNA, 107 bp, Artificial Sequence; identical to SEQ ID NO: 1097
  scaffold variant

SEQ ID NO: 2681 - DNA, 107 bp, Artificial Sequence
  scaffold variant
cctggcgctcttatctcattactttgagagccatcaccagcgactatgtcgtatgggtaaagcgcttatttatcggagagaaatccgataaataagaagcatcaaag

SEQ ID NO: 2682 - DNA, 107 bp, Artificial Sequence; identical to SEQ ID NO: 1091
  scaffold variant

SEQ ID NO: 2683 - DNA, 107 bp, Artificial Sequence; identical to SEQ ID NO: 833
  scaffold variant

SEQ ID NO: 2684 - DNA, 106 bp, Artificial Sequence; identical to SEQ ID NO: 429
  scaffold variant

SEQ ID NO: 2685 - DNA, 109 bp, Artificial Sequence; identical to SEQ ID NO: 802
  scaffold variant

SEQ ID NO: 2686 - DNA, 108 bp, Artificial Sequence
  scaffold variant
tactggcgcttttatctcattactttgagagccatcaccagcgactatgtcgtatgggtaaagcgatatttatcggagagaaatcccgataaataagaagcatcaaag

SEQ ID NO: 2687 - DNA, 107 bp, Artificial Sequence; identical to SEQ ID NO: 833
  scaffold variant

SEQ ID NO: 2688 - DNA, 108 bp, Artificial Sequence
  scaffold variant
tactggcgcttttatctcattactttgagagccatcaccagcgactatgtcgtatgggtaaagcgcttatttatcgggagaaatccgataaataagagagcatcaaag

SEQ ID NO: 2689 - DNA, 107 bp, Artificial Sequence
  scaffold variant
tactggcgcttttatctcattactttgagagccatcaccagcgactatgtcgtatgggtaaagcgcttatttatcggagtaaatccgataaataagaagcatcaaag

SEQ ID NO: 2690 - DNA, 106 bp, Artificial Sequence; identical to SEQ ID NO: 532
  scaffold variant

SEQ ID NO: 2691 - DNA, 108 bp, Artificial Sequence
  scaffold variant
tactggcgcttttatctcattactttgagagccatcaccagcgactatgtcgtatgggtaaagcggtatttatgcggagagaaatccgataaataagaagcatcaaag

SEQ ID NO: 2692 - DNA, 109 bp, Artificial Sequence; identical to SEQ ID NO: 1010
  scaffold variant

SEQ ID NO: 2693 - DNA, 107 bp, Artificial Sequence
  scaffold variant
cctggcgcttttatctcataactttgagagccatcaccagcgactatgtcgtatgggtaaagcgcttatttatcggagagaaatccgataaataagaagcatcaaag

SEQ ID NO: 2694 - DNA, 107 bp, Artificial Sequence; identical to SEQ ID NO: 1678
  scaffold variant

SEQ ID NO: 2695 - DNA, 108 bp, Artificial Sequence
  scaffold variant
atactggcgcttttatctcattactttgagagccatcaccagcgactatgtcgtatgggtaaagcgcttatttatcgggagaaatccgataaataagaagcatcaaag

SEQ ID NO: 2696 - DNA, 109 bp, Artificial Sequence; identical to SEQ ID NO: 980
  scaffold variant

SEQ ID NO: 2697 - DNA, 107 bp, Artificial Sequence
  scaffold variant
ccttgcgcttttatctcattactttgagagccatcaccagcgactatgtcgtatgggtaaagcgcttatttatcggagagaaatccgataaataagaagcatcaaag

SEQ ID NO: 2698 - DNA, 107 bp, Artificial Sequence; identical to SEQ ID NO: 1091
  scaffold variant

SEQ ID NO: 2699 - DNA, 108 bp, Artificial Sequence
  scaffold variant
cctggcgcttttatctcattactttgagagccatcaccagcgactatgtcgtatgggtaaagcgcttatttatcggagagaaatccgataaataagaagcatcaaagc

SEQ ID NO: 2700 - DNA, 107 bp, Artificial Sequence; identical to SEQ ID NO: 1915
  scaffold variant

SEQ ID NO: 2701 - DNA, 108 bp, Artificial Sequence; identical to SEQ ID NO: 442
  scaffold variant

SEQ ID NO: 2702 - DNA, 107 bp, Artificial Sequence; identical to SEQ ID NO: 972
  scaffold variant

SEQ ID NO: 2703 - DNA, 106 bp, Artificial Sequence; identical to SEQ ID NO: 1784
  scaffold variant

SEQ ID NO: 2704 - DNA, 109 bp, Artificial Sequence
  scaffold variant
tactggcgcttttatctcattactttgagagccatcaccagcgactatgtcgtatgggtaaagcgcttatttatcggagagaaatccgataaataagagagcatcaaag

SEQ ID NO: 2705 - DNA, 107 bp, Artificial Sequence; identical to SEQ ID NO: 1218
  scaffold variant

SEQ ID NO: 2706 - DNA, 109 bp, Artificial Sequence; identical to SEQ ID NO: 1196
  scaffold variant

SEQ ID NO: 2707 - DNA, 107 bp, Artificial Sequence; identical to SEQ ID NO: 1757
  scaffold variant

SEQ ID NO: 2708 - DNA, 107 bp, Artificial Sequence; identical to SEQ ID NO: 972
  scaffold variant

SEQ ID NO: 2709 - DNA, 107 bp, Artificial Sequence; identical to SEQ ID NO: 1707
  scaffold variant

SEQ ID NO: 2710 - DNA, 109 bp, Artificial Sequence; identical to SEQ ID NO: 941
  scaffold variant

SEQ ID NO: 2711 - DNA, 107 bp, Artificial Sequence; identical to SEQ ID NO: 972
  scaffold variant

SEQ ID NO: 2712 - DNA, 107 bp, Artificial Sequence; identical to SEQ ID NO: 990
  scaffold variant

SEQ ID NO: 2713 - DNA, 106 bp, Artificial Sequence; identical to SEQ ID NO: 469
  scaffold variant

SEQ ID NO: 2714 - DNA, 108 bp, Artificial Sequence
  scaffold variant
tactggcgcttttatctcattactttgagagccatcaccagcgactatgtcgtatgggtaaagcgcttatttatccggagagaaatccgatgataagaagcatcaaag

SEQ ID NO: 2715 - DNA, 106 bp, Artificial Sequence; identical to SEQ ID NO: 1235
  scaffold variant

SEQ ID NO: 2716 - DNA, 108 bp, Artificial Sequence
  scaffold variant
tactggcgcttttatctcattactttgagagccatcaccagcgactatgtcgtatgggtaaagcgcttatttatccggagagaaatccgatagtaagaagcatcaaag

SEQ ID NO: 2717 - DNA, 107 bp, Artificial Sequence
  scaffold variant
tactggcgcttttatctaattactttgagagccatcaccagcgactatgtcgtatgggtaaagcgcttatttatcgggagaaatccgataaataagaagcatcaaag

SEQ ID NO: 2718 - DNA, 109 bp, Artificial Sequence; identical to SEQ ID NO: 1010
  scaffold variant

SEQ ID NO: 2719 - DNA, 110 bp, Artificial Sequence
  scaffold variant
ctactggcgcttttatctcattactttgagagccatcaccagcgactatgtcgtatgggtaaagcgcttatttatcggagagaaatgccgataaataagaagcatcaaag

SEQ ID NO: 2720 - DNA, 108 bp, Artificial Sequence
  scaffold variant
tactggcgcttttatctcattactttgagagccatcaccagcgactatgtcgtatgggtaaagcgcttattttcggagagaaatctcgataaataagaagcatcaaag

SEQ ID NO: 2721 - DNA, 108 bp, Artificial Sequence; identical to SEQ ID NO: 516
  scaffold variant

SEQ ID NO: 2722 - DNA, 109 bp, Artificial Sequence; identical to SEQ ID NO: 1183
  scaffold variant

SEQ ID NO: 2723 - DNA, 109 bp, Artificial Sequence; identical to SEQ ID NO: 912
  scaffold variant

SEQ ID NO: 2724 - DNA, 107 bp, Artificial Sequence; identical to SEQ ID NO: 915
  scaffold variant

SEQ ID NO: 2725 - DNA, 108 bp, Artificial Sequence
  scaffold variant
tactggcgcttttatctcattactttgagagccatcaccagcgactatgtcgtatgggtaaagcgcttatttacggagagaaatcacgataaataagaagcatcaaag

SEQ ID NO: 2726 - DNA, 107 bp, Artificial Sequence; identical to SEQ ID NO: 1091
  scaffold variant

SEQ ID NO: 2727 - DNA, 109 bp, Artificial Sequence; identical to SEQ ID NO: 740
  scaffold variant

SEQ ID NO: 2728 - DNA, 108 bp, Artificial Sequence; identical to SEQ ID NO: 1428
  scaffold variant

SEQ ID NO: 2729 - DNA, 106 bp, Artificial Sequence
  scaffold variant
tactggcgcttttatctcattactttgagagccatcaccagcgactatgtcgtatgggtaaagcgatatttatcgagagaaatccgataaataagaagcatcaaag

SEQ ID NO: 2730 - DNA, 107 bp, Artificial Sequence; identical to SEQ ID NO: 1262
  scaffold variant

SEQ ID NO: 2731 - DNA, 108 bp, Artificial Sequence
  scaffold variant
tactggcgcttttatctcattactttgagagccatcaccagcgactatgtcgtatgggtaaagcgcttatttatccagagaaatccgataaataagaagcatcaaagc

SEQ ID NO: 2732 - DNA, 109 bp, Artificial Sequence; identical to SEQ ID NO: 1786
  scaffold variant

SEQ ID NO: 2733 - DNA, 107 bp, Artificial Sequence; identical to SEQ ID NO: 1218
  scaffold variant

SEQ ID NO: 2734 - DNA, 109 bp, Artificial Sequence; identical to SEQ ID NO: 740
  scaffold variant

SEQ ID NO: 2735 - DNA, 110 bp, Artificial Sequence
  scaffold variant
tactggcgcttttatactcattactttgagagccatcaccagcgactatgtcgtatgggtaaagcgcttattctatcggagagaaatccgataaataagaagcatcaaag

SEQ ID NO: 2736 - DNA, 108 bp, Artificial Sequence
  scaffold variant
actggcgcttttatctcattactttgagagccatcaccagcgactatgtcgtatgggtaaagcgcttatttatcggagagtaaatccgataaataagaagcatcaaag

SEQ ID NO: 2737 - DNA, 110 bp, Artificial Sequence
  scaffold variant
taactggcgcttttatctcattactttgagagccatcaccagcgactatgtcgtatgggtaaagcgcttatttatcggcagagaaatccgataaataagaagcatcaaag

SEQ ID NO: 2738 - DNA, 109 bp, Artificial Sequence; identical to SEQ ID NO: 740
  scaffold variant

SEQ ID NO: 2739 - DNA, 107 bp, Artificial Sequence
  scaffold variant
ctggcgcttttatctcattactttgagagccatcaccagcgactatgtcgtatgggtaaagcgcttatttatcggagagtaaatccgataaataagaagcatcaaag

SEQ ID NO: 2740 - DNA, 107 bp, Artificial Sequence; identical to SEQ ID NO: 1678
  scaffold variant

SEQ ID NO: 2741 - DNA, 110 bp, Artificial Sequence
  scaffold variant
tactggcgcttttatctcgattactttgagagccatcaccagcgactatgtcgtatgggtaaagcgcttatttatcggagagaaatccgcataaataagaagcatcaaag

SEQ ID NO: 2742 - DNA, 105 bp, Artificial Sequence; identical to SEQ ID NO: 789
  scaffold variant

SEQ ID NO: 2743 - DNA, 106 bp, Artificial Sequence; identical to SEQ ID NO: 489
  scaffold variant

SEQ ID NO: 2744 - DNA, 107 bp, Artificial Sequence
  scaffold variant
tactggcgcttttatctcattactttgagagccatcaccagcgactatgtcgtatgggtaaagcgcttatttatcgttagaaatccgataaataagaagcatcaaag

SEQ ID NO: 2745 - DNA, 108 bp, Artificial Sequence
  scaffold variant
tactggcgcttttatctctattactttgagagccatcaccagcgactatgtcgtatgggtaaagcgcttatttatcggagagaaaacgataaataagaagcatcaaag

SEQ ID NO: 2746 - DNA, 109 bp, Artificial Sequence; identical to SEQ ID NO: 740
  scaffold variant

SEQ ID NO: 2747 - DNA, 107 bp, Artificial Sequence; identical to SEQ ID NO: 2398
  scaffold variant

SEQ ID NO: 2748 - DNA, 110 bp, Artificial Sequence
  scaffold variant
tactggcgcttttatctcattactttgagagccatcaccagcgactatgtcgtatgggtaaagcgcttatttatccggagagagaatccgataaataagaagcatcaaag

SEQ ID NO: 2749 - DNA, 107 bp, Artificial Sequence; identical to SEQ ID NO: 765
  scaffold variant

SEQ ID NO: 2750 - DNA, 107 bp, Artificial Sequence; identical to SEQ ID NO: 2398
  scaffold variant

SEQ ID NO: 2751 - DNA, 109 bp, Artificial Sequence; identical to SEQ ID NO: 2391
  scaffold variant

SEQ ID NO: 2752 - DNA, 107 bp, Artificial Sequence; identical to SEQ ID NO: 1218
  scaffold variant

SEQ ID NO: 2753 - DNA, 109 bp, Artificial Sequence; identical to SEQ ID NO: 1119
  scaffold variant

SEQ ID NO: 2754 - DNA, 109 bp, Artificial Sequence; identical to SEQ ID NO: 980
  scaffold variant

SEQ ID NO: 2755 - DNA, 109 bp, Artificial Sequence; identical to SEQ ID NO: 740
  scaffold variant

SEQ ID NO: 2756 - DNA, 106 bp, Artificial Sequence
  scaffold variant
tactggcgcttttatctcattactttgagagccatcaccagcgactatgtcgtatgggtaaagcgcttatttacggagagaaatccataaataagaagcatcaaag

SEQ ID NO: 2757 - DNA, 107 bp, Artificial Sequence
  scaffold variant
tactggcgcttttatctctattactttgagagccatcaccagcgactatgtcgtatgggtaaagcgcttatttatcggggaaatccgataaataagaagcatcaaag

SEQ ID NO: 2758 - DNA, 107 bp, Artificial Sequence
  scaffold variant
tactggcgcttttatctcattactttgagagccataaccagcgactatgtcgtatgggtaaagcgcttatttatcgagagaaatccgataaataagaagcatcaaag

SEQ ID NO: 2759 - DNA, 109 bp, Artificial Sequence; identical to SEQ ID NO: 941
  scaffold variant

SEQ ID NO: 2760 - DNA, 107 bp, Artificial Sequence; identical to SEQ ID NO: 1036
  scaffold variant

SEQ ID NO: 2761 - DNA, 107 bp, Artificial Sequence
  scaffold variant
tacggcgcttttatctcattactttgagagccatcaccagcgactatgtcgtatgggtaaagctcttatttatcggagagaaatccgataaataagaagcatcaaag

SEQ ID NO: 2762 - DNA, 108 bp, Artificial Sequence; identical to SEQ ID NO: 610
  scaffold variant

SEQ ID NO: 2763 - DNA, 107 bp, Artificial Sequence; identical to SEQ ID NO: 1286
  scaffold variant

SEQ ID NO: 2764 - DNA, 106 bp, Artificial Sequence; identical to SEQ ID NO: 459
  scaffold variant

SEQ ID NO: 2765 - DNA, 107 bp, Artificial Sequence; identical to SEQ ID NO: 1707
  scaffold variant

SEQ ID NO: 2766 - DNA, 108 bp, Artificial Sequence; identical to SEQ ID NO: 374
  scaffold variant

SEQ ID NO: 2767 - DNA, 107 bp, Artificial Sequence; identical to SEQ ID NO: 915
  scaffold variant

SEQ ID NO: 2768 - DNA, 109 bp, Artificial Sequence; identical to SEQ ID NO: 1121
  scaffold variant

SEQ ID NO: 2769 - DNA, 106 bp, Artificial Sequence
  scaffold variant
tactggcgcttttatctcattactttgagagccatcaccagcgactatgtcgtatgggtaaagcgcttatttatggagagaaatccataaataagaagcatcaaag

SEQ ID NO: 2770 - DNA, 109 bp, Artificial Sequence
  scaffold variant
tactggcgcttttatcctcattactttgagagccatcaccagcgactatgtcgtatgggtaaagcgcttatttgtcggagagaaatccgataaataagaagcatcaaag

SEQ ID NO: 2771 - DNA, 109 bp, Artificial Sequence; identical to SEQ ID NO: 1177
  scaffold variant

SEQ ID NO: 2772 - DNA, 107 bp, Artificial Sequence; identical to SEQ ID NO: 972
  scaffold variant

SEQ ID NO: 2773 - DNA, 109 bp, Artificial Sequence; identical to SEQ ID NO: 910
  scaffold variant

SEQ ID NO: 2774 - DNA, 109 bp, Artificial Sequence; identical to SEQ ID NO: 740
  scaffold variant

SEQ ID NO: 2775 - DNA, 107 bp, Artificial Sequence; identical to SEQ ID NO: 1744
  scaffold variant

SEQ ID NO: 2776 - DNA, 108 bp, Artificial Sequence
  scaffold variant
ctactggcgcttttatctcattactttgagagccatcaccagcgactatgtcgtatgggtaaagcgcttatttatcgtgagaaatccgataaataagaagcatcaaag

SEQ ID NO: 2777 - DNA, 106 bp, Artificial Sequence; identical to SEQ ID NO: 1934
  scaffold variant

SEQ ID NO: 2778 - DNA, 109 bp, Artificial Sequence
  scaffold variant
tactggcgcttttatcttcattactttgagagccatcaccagcgactatgtcgtatgggtaaagcgcttatttgtcggagagaaatccgataaataagaagcatcaaag

SEQ ID NO: 2779 - DNA, 107 bp, Artificial Sequence; identical to SEQ ID NO: 915
  scaffold variant

SEQ ID NO: 2780 - DNA, 106 bp, Artificial Sequence
  scaffold variant
tactggcgcttttatctcattactttgagagccatcaccagcgactatgtcgtatgggtaaagcggtatttatcggagataatccgataaataagaagcatcaaag

SEQ ID NO: 2781 - DNA, 108 bp, Artificial Sequence
  scaffold variant
tactggcgcttttatctcattactttgagagccatcaccagcgactatgtcgtatgggtaaagcgcttatttatccagagaaatccgataaataagaaagcatcaaag

SEQ ID NO: 2782 - DNA, 107 bp, Artificial Sequence
  scaffold variant
tactggcgcttttatctcattactttgagagccatcaccagcgactatgtcgtatgggtaaagcgcttatttatagagagaaatccgataaataagaagcatcaaag

SEQ ID NO: 2783 - DNA, 109 bp, Artificial Sequence; identical to SEQ ID NO: 1119
  scaffold variant

SEQ ID NO: 2784 - DNA, 109 bp, Artificial Sequence; identical to SEQ ID NO: 1183
  scaffold variant

SEQ ID NO: 2785 - DNA, 107 bp, Artificial Sequence; identical to SEQ ID NO: 833
  scaffold variant

SEQ ID NO: 2786 - DNA, 107 bp, Artificial Sequence; identical to SEQ ID NO: 1262
  scaffold variant

SEQ ID NO: 2787 - DNA, 109 bp, Artificial Sequence; identical to SEQ ID NO: 518
  scaffold variant

SEQ ID NO: 2788 - DNA, 106 bp, Artificial Sequence
  scaffold variant
tacggcgcttttatctcattactttgagagccatcaccagcgactatgtcgtatgggtaaagcgcttatttatcggagagaaatccgatagtaagaagcatcaaag

SEQ ID NO: 2789 - DNA, 107 bp, Artificial Sequence; identical to SEQ ID NO: 833
  scaffold variant

SEQ ID NO: 2790 - DNA, 109 bp, Artificial Sequence; identical to SEQ ID NO: 1177
  scaffold variant

SEQ ID NO: 2791 - DNA, 107 bp, Artificial Sequence; identical to SEQ ID NO: 1262
  scaffold variant

SEQ ID NO: 2792 - DNA, 109 bp, Artificial Sequence; identical to SEQ ID NO: 1048
  scaffold variant

SEQ ID NO: 2793 - DNA, 107 bp, Artificial Sequence
  scaffold variant
tctgtcgcttttatctcattactttgagagccatcaccagcgactatgtcgtatgggtaaagcgcttatttatcggagagaaatccgataaataagaagcatcaaag

SEQ ID NO: 2794 - DNA, 107 bp, Artificial Sequence; identical to SEQ ID NO: 1036
  scaffold variant

SEQ ID NO: 2795 - DNA, 108 bp, Artificial Sequence
  scaffold variant
tactggcgcttttatctcattactttgagagccatcaccagcgactatgtcgtatgggtaaagcgcttatttatgcggagagtatccgataaataagaagcatcaaag

SEQ ID NO: 2796 - DNA, 106 bp, Artificial Sequence; identical to SEQ ID NO: 401
  scaffold variant

SEQ ID NO: 2797 - DNA, 109 bp, Artificial Sequence; identical to SEQ ID NO: 980
  scaffold variant

SEQ ID NO: 2798 - DNA, 109 bp, Artificial Sequence; identical to SEQ ID NO: 2572
  scaffold variant

SEQ ID NO: 2799 - DNA, 106 bp, Artificial Sequence; identical to SEQ ID NO: 1784
  scaffold variant

SEQ ID NO: 2800 - DNA, 108 bp, Artificial Sequence
  scaffold variant
tactggcgcttttatctacattactttgagagccatcaccagcgactatgtcgtatgggtaaagcgcttatttccggagagaaatccgataaataagaagcatcaaag

SEQ ID NO: 2801 - DNA, 109 bp, Artificial Sequence; identical to SEQ ID NO: 740
  scaffold variant

SEQ ID NO: 2802 - DNA, 106 bp, Artificial Sequence; identical to SEQ ID NO: 385
  scaffold variant

SEQ ID NO: 2803 - DNA, 109 bp, Artificial Sequence; identical to SEQ ID NO: 1183
  scaffold variant

SEQ ID NO: 2804 - DNA, 108 bp, Artificial Sequence
  scaffold variant
tactggcgcttttatctcattactttgagagccatcaccagcgactatgtcgtatgggtaaagcggtatttatcggcagagaaatccgataaataagaagcatcaaag

SEQ ID NO: 2805 - DNA, 107 bp, Artificial Sequence; identical to SEQ ID NO: 1262
  scaffold variant

SEQ ID NO: 2806 - DNA, 107 bp, Artificial Sequence
  scaffold variant
tactggcgcttttatctaattactttgagagccatcaccagcgactatgtcgtatgggtaaagcgcttatttatcaagagaaatccgataaataagaagcatcaaag

SEQ ID NO: 2807 - DNA, 107 bp, Artificial Sequence; identical to SEQ ID NO: 972
  scaffold variant

SEQ ID NO: 2808 - DNA, 107 bp, Artificial Sequence; identical to SEQ ID NO: 1915
  scaffold variant

SEQ ID NO: 2809 - DNA, 109 bp, Artificial Sequence
  scaffold variant
tactggcgcttttatctaattactttgagagccatcaccagcgactatgtcgtatgggtaaagcgcttatttatcggagagaaatcccgataaataagaagcatcaaag

SEQ ID NO: 2810 - DNA, 107 bp, Artificial Sequence; identical to SEQ ID NO: 1707
  scaffold variant

SEQ ID NO: 2811 - DNA, 109 bp, Artificial Sequence; identical to SEQ ID NO: 740
  scaffold variant

SEQ ID NO: 2812 - DNA, 107 bp, Artificial Sequence; identical to SEQ ID NO: 833
  scaffold variant

SEQ ID NO: 2813 - DNA, 109 bp, Artificial Sequence; identical to SEQ ID NO: 837
  scaffold variant

SEQ ID NO: 2814 - DNA, 109 bp, Artificial Sequence; identical to SEQ ID NO: 912
  scaffold variant

SEQ ID NO: 2815 - DNA, 109 bp, Artificial Sequence; identical to SEQ ID NO: 740
  scaffold variant

SEQ ID NO: 2816 - DNA, 109 bp, Artificial Sequence; identical to SEQ ID NO: 1145
  scaffold variant

SEQ ID NO: 2817 - DNA, 109 bp, Artificial Sequence; identical to SEQ ID NO: 1183
  scaffold variant

SEQ ID NO: 2818 - DNA, 107 bp, Artificial Sequence; identical to SEQ ID NO: 1091
  scaffold variant

SEQ ID NO: 2819 - DNA, 107 bp, Artificial Sequence; identical to SEQ ID NO: 1036
  scaffold variant

SEQ ID NO: 2820 - DNA, 107 bp, Artificial Sequence; identical to SEQ ID NO: 1218
  scaffold variant

SEQ ID NO: 2821 - DNA, 107 bp, Artificial Sequence; identical to SEQ ID NO: 1036
  scaffold variant

SEQ ID NO: 2822 - DNA, 106 bp, Artificial Sequence; identical to SEQ ID NO: 1784
  scaffold variant

SEQ ID NO: 2823 - DNA, 110 bp, Artificial Sequence
  scaffold variant
tactggcgcttttatctcattactttgagagccatcaccagcgactatgtcgtatgggtaaagcgcttatttatccggagagaaatccgataaataagaagcatcaaagc

SEQ ID NO: 2824 - DNA, 106 bp, Artificial Sequence; identical to SEQ ID NO: 1784
  scaffold variant

SEQ ID NO: 2825 - DNA, 108 bp, Artificial Sequence; identical to SEQ ID NO: 610
  scaffold variant

SEQ ID NO: 2826 - DNA, 109 bp, Artificial Sequence; identical to SEQ ID NO: 947
  scaffold variant

SEQ ID NO: 2827 - DNA, 107 bp, Artificial Sequence; identical to SEQ ID NO: 972
  scaffold variant

SEQ ID NO: 2828 - DNA, 106 bp, Artificial Sequence
  scaffold variant
cctggcgcttttattcattactttgagagccatcaccagcgactatgtcgtatgggtaaagcgcttatttatcggagagaaatccgataaataagaagcatcaaag

SEQ ID NO: 2829 - DNA, 108 bp, Artificial Sequence
  scaffold variant
tactggcgcttttatctcattactttgagagccatcaccagcgactatgtcgtatgggtaaagcgcttattctatcggagagaaatccataaataagaagcatcaaag

SEQ ID NO: 2830 - DNA, 107 bp, Artificial Sequence; identical to SEQ ID NO: 990
  scaffold variant

SEQ ID NO: 2831 - DNA, 108 bp, Artificial Sequence
  scaffold variant
tactggcgcttttatctcattactttgagagccatcaccagcgactatgtcgtatgggtaaagcgcttatttatcgggagaaatccgataaataagaagcatcaaagc

SEQ ID NO: 2832 - DNA, 107 bp, Artificial Sequence; identical to SEQ ID NO: 1915
  scaffold variant

SEQ ID NO: 2833 - DNA, 107 bp, Artificial Sequence; identical to SEQ ID NO: 990
  scaffold variant

SEQ ID NO: 2834 - DNA, 105 bp, Artificial Sequence; identical to SEQ ID NO: 428
  scaffold variant

SEQ ID NO: 2835 - DNA, 107 bp, Artificial Sequence; identical to SEQ ID NO: 1915
  scaffold variant

SEQ ID NO: 2836 - DNA, 109 bp, Artificial Sequence; identical to SEQ ID NO: 912
  scaffold variant

SEQ ID NO: 2837 - DNA, 108 bp, Artificial Sequence
  scaffold variant
tactggcgcttttatctcattactttgagagccatcaccagcgactatgtcgtatgggtaaagcgcttatttgcggagagaaatcgcgataaataagaagcatcaaag

SEQ ID NO: 2838 - DNA, 107 bp, Artificial Sequence
  scaffold variant
tacggcgcttttatctcattactttgagagccatcaccagcgactatgtcgtatgggtaaagcgcttatttatcggagagaaattcgataaataagaagcatcaaag

SEQ ID NO: 2839 - DNA, 110 bp, Artificial Sequence
  scaffold variant
tactggcgcttttatctcattactttgagagccatcaccagcgactatgtcgtatgggtaaagcgcttatttatcgggagagaaatccgataaataagaagcatcaaagc

SEQ ID NO: 2840 - DNA, 109 bp, Artificial Sequence; identical to SEQ ID NO: 912
  scaffold variant

SEQ ID NO: 2841 - DNA, 106 bp, Artificial Sequence; identical to SEQ ID NO: 1784
  scaffold variant

SEQ ID NO: 2842 - DNA, 110 bp, Artificial Sequence
  scaffold variant
tactggcgcttttatctcattactttgagagccatcaccagcgactatgtcgtatgggtaaagcgcttatttatccggagagaaaatccgataaataagaagcatcaaag

SEQ ID NO: 2843 - DNA, 109 bp, Artificial Sequence; identical to SEQ ID NO: 912
  scaffold variant

SEQ ID NO: 2844 - DNA, 108 bp, Artificial Sequence
  scaffold variant
tactggcgcttttattctcattactttgagagccatcaccagcgactatgtcgtatgggtaaagcgttatttatcggagagaaatccgataaataagaagcatcaaag

SEQ ID NO: 2845 - DNA, 107 bp, Artificial Sequence; identical to SEQ ID NO: 1844
  scaffold variant

SEQ ID NO: 2846 - DNA, 109 bp, Artificial Sequence; identical to SEQ ID NO: 1010
  scaffold variant

SEQ ID NO: 2847 - DNA, 107 bp, Artificial Sequence; identical to SEQ ID NO: 1262
  scaffold variant

SEQ ID NO: 2848 - DNA, 107 bp, Artificial Sequence; identical to SEQ ID NO: 1844
  scaffold variant

SEQ ID NO: 2849 - DNA, 107 bp, Artificial Sequence; identical to SEQ ID NO: 990
  scaffold variant

SEQ ID NO: 2850 - DNA, 109 bp, Artificial Sequence; identical to SEQ ID NO: 1555
  scaffold variant

SEQ ID NO: 2851 - DNA, 108 bp, Artificial Sequence
  scaffold variant
tactggcgcttttatctcattactttgagagccatcaccagcgactatgtcgtatgggtaaagcgcttatttatcgggagagaaatccgataataagaagcatcaaag

SEQ ID NO: 2852 - DNA, 108 bp, Artificial Sequence
  scaffold variant
tactggcgcttttattctcattactttgagagccatcaccagcgactatgtcgtatgggtaaagcgcttatttatcggagagaaatccgatagtaagaagcatcaaag

SEQ ID NO: 2853 - DNA, 107 bp, Artificial Sequence; identical to SEQ ID NO: 1091
  scaffold variant

SEQ ID NO: 2854 - DNA, 107 bp, Artificial Sequence; identical to SEQ ID NO: 2398
  scaffold variant

SEQ ID NO: 2855 - DNA, 109 bp, Artificial Sequence; identical to SEQ ID NO: 1119
  scaffold variant

SEQ ID NO: 2856 - DNA, 107 bp, Artificial Sequence; identical to SEQ ID NO: 1097
  scaffold variant

SEQ ID NO: 2857 - DNA, 109 bp, Artificial Sequence; identical to SEQ ID NO: 740
  scaffold variant

SEQ ID NO: 2858 - DNA, 107 bp, Artificial Sequence; identical to SEQ ID NO: 972
  scaffold variant

SEQ ID NO: 2859 - DNA, 109 bp, Artificial Sequence
  scaffold variant
tactggcgcttttatctaattactttgagagccatcaccagcgactatgtcgtatgggtaaagcgcttatttatcgggagagaaatccgataaataagaagcatcaaag

SEQ ID NO: 2860 - DNA, 110 bp, Artificial Sequence
  scaffold variant
tactggcgcttttatctcattactttgagagccatcaccagcgactatgtcgtattgggtaaagcgcttatttatacggagagaaatccgataaataagaagcatcaaag

SEQ ID NO: 2861 - DNA, 108 bp, Artificial Sequence
  scaffold variant
tactggcgcttttatctcattactttgagagccatcaccagcgactatgtcgtatgggtaaagcgcttatttattcggagagaaatccgatagtaagaagcatcaaag

SEQ ID NO: 2862 - DNA, 106 bp, Artificial Sequence; identical to SEQ ID NO: 484
  scaffold variant

SEQ ID NO: 2863 - DNA, 109 bp, Artificial Sequence
  scaffold variant
tactggcgcttttattctcattactttgagagccatcaccagcgactatgtcgtatgggtaaagcgcttatttatctgagagaaatccgataaataagaagcatcaaag

SEQ ID NO: 2864 - DNA, 109 bp, Artificial Sequence; identical to SEQ ID NO: 740
  scaffold variant

SEQ ID NO: 2865 - DNA, 107 bp, Artificial Sequence; identical to SEQ ID NO: 833
  scaffold variant

SEQ ID NO: 2866 - DNA, 110 bp, Artificial Sequence
  scaffold variant
tactggcgcttttatctcattactttgagagccatcaccagcgactatgtcgtatgggtaaagcgcttatttatacggagagaaatccgaataaataagaagcatcaaag

SEQ ID NO: 2867 - DNA, 110 bp, Artificial Sequence
  scaffold variant
tactggcgcttttatctcattactttgagagccatcaccagcgactatgtcgtatgggtaaagcgcttattttatcgggagagaaatccgataaataagaagcatcaaag

SEQ ID NO: 2868 - DNA, 107 bp, Artificial Sequence; identical to SEQ ID NO: 990
  scaffold variant

SEQ ID NO: 2869 - DNA, 107 bp, Artificial Sequence; identical to SEQ ID NO: 1036
  scaffold variant

SEQ ID NO: 2870 - DNA, 107 bp, Artificial Sequence; identical to SEQ ID NO: 1915
  scaffold variant

SEQ ID NO: 2871 - DNA, 109 bp, Artificial Sequence; identical to SEQ ID NO: 1183
  scaffold variant

SEQ ID NO: 2872 - DNA, 107 bp, Artificial Sequence; identical to SEQ ID NO: 833
  scaffold variant

SEQ ID NO: 2873 - DNA, 108 bp, Artificial Sequence
  scaffold variant
tactggcgcttttatctcattactttgagagccatcaccagcgactatgtcgtatgggtaaagctttatttatcggagagaaatcgcgataaataagaagcatcaaag

SEQ ID NO: 2874 - DNA, 108 bp, Artificial Sequence
  scaffold variant
tactggcgcttttatctcattactttgagagccatcaccagcgactatgtcgtatgggtaaagcgcttatttactcggagagaaatcgataaataagaagcatcaaag

SEQ ID NO: 2875 - DNA, 107 bp, Artificial Sequence; identical to SEQ ID NO: 972
  scaffold variant

SEQ ID NO: 2876 - DNA, 106 bp, Artificial Sequence; identical to SEQ ID NO: 790
  scaffold variant

SEQ ID NO: 2877 - DNA, 107 bp, Artificial Sequence; identical to SEQ ID NO: 1262
  scaffold variant

SEQ ID NO: 2878 - DNA, 109 bp, Artificial Sequence; identical to SEQ ID NO: 1177
  scaffold variant

SEQ ID NO: 2879 - DNA, 105 bp, Artificial Sequence; identical to SEQ ID NO: 379
  scaffold variant

SEQ ID NO: 2880 - DNA, 107 bp, Artificial Sequence; identical to SEQ ID NO: 1691
  scaffold variant

SEQ ID NO: 2881 - DNA, 109 bp, Artificial Sequence; identical to SEQ ID NO: 1119
  scaffold variant

SEQ ID NO: 2882 - DNA, 109 bp, Artificial Sequence; identical to SEQ ID NO: 1555
  scaffold variant

SEQ ID NO: 2883 - DNA, 110 bp, Artificial Sequence
  scaffold variant
tactggcgcttttatctcattactttgagagccatcaccagcgactatgtcgtatgggtaaagcgcttatttatacggagagaaatccgataaataagagagcatcaaag

SEQ ID NO: 2884 - DNA, 109 bp, Artificial Sequence
  scaffold variant
tactggcgcttttatctcattactttgagagccatcaacagcgactatgtcgtatgggtaaagcgcttatttatgcggagagaaatccgataaataagaagcatcaaag

SEQ ID NO: 2885 - DNA, 107 bp, Artificial Sequence
  scaffold variant
tactggcgcttttatctcattactttgagagccatcaccagcgactatgtcgtatgggtaaagcgcttatttatagggagaaatccgataaataagaagcatcaaag

SEQ ID NO: 2886 - DNA, 107 bp, Artificial Sequence
  scaffold variant
tactggcgcttttatcccattactttgagagccatcaccagcgactatgtcgtatgggtaaagcgcttatttatcgagagaaatccgataaataagaagcatcaaag

SEQ ID NO: 2887 - DNA, 108 bp, Artificial Sequence
  scaffold variant
tactggcgcttttatctcattactttgagagccatcaccagcgactatgtcgtatgggtaaagcgcttatttagtcggagagaaatccataaataagaagcatcaaag

SEQ ID NO: 2888 - DNA, 108 bp, Artificial Sequence
  scaffold variant
tactggcgcttttatctcattactttgagagccatcaccagcgactatgtcgtatgggtaaagcgcttatttgcggagagaaatcccgataaataagaagcatcaaag

SEQ ID NO: 2889 - DNA, 107 bp, Artificial Sequence; identical to SEQ ID NO: 1262
  scaffold variant

SEQ ID NO: 2890 - DNA, 106 bp, Artificial Sequence; identical to SEQ ID NO: 487
  scaffold variant

SEQ ID NO: 2891 - DNA, 107 bp, Artificial Sequence
  scaffold variant
tacggcgcttttatctcattactttgagagccatcaccagcgactatgtcgtatgggtaaagcgcttatttatcgaagagaaatccgataaataagaagcatcaaag

SEQ ID NO: 2892 - DNA, 107 bp, Artificial Sequence; identical to SEQ ID NO: 1915
  scaffold variant

SEQ ID NO: 2893 - DNA, 109 bp, Artificial Sequence; identical to SEQ ID NO: 518
  scaffold variant

SEQ ID NO: 2894 - DNA, 107 bp, Artificial Sequence; identical to SEQ ID NO: 990
  scaffold variant

SEQ ID NO: 2895 - DNA, 109 bp, Artificial Sequence; identical to SEQ ID NO: 2073
  scaffold variant

SEQ ID NO: 2896 - DNA, 107 bp, Artificial Sequence; identical to SEQ ID NO: 1707
  scaffold variant

SEQ ID NO: 2897 - DNA, 107 bp, Artificial Sequence; identical to SEQ ID NO: 1678
  scaffold variant

SEQ ID NO: 2898 - DNA, 107 bp, Artificial Sequence; identical to SEQ ID NO: 1757
  scaffold variant

SEQ ID NO: 2899 - DNA, 107 bp, Artificial Sequence; identical to SEQ ID NO: 1262
  scaffold variant

SEQ ID NO: 2900 - DNA, 106 bp, Artificial Sequence; identical to SEQ ID NO: 385
  scaffold variant

SEQ ID NO: 2901 - DNA, 108 bp, Artificial Sequence
  scaffold variant
tactggcgcttttatctcattactttgagagccatcaccagcgactatgtcgtattgggtaaagcgcttatttattgagagaaatccgataaataagaagcatcaaag

SEQ ID NO: 2902 - DNA, 107 bp, Artificial Sequence; identical to SEQ ID NO: 1707
  scaffold variant

SEQ ID NO: 2903 - DNA, 107 bp, Artificial Sequence
  scaffold variant
cactggcgcttttatctcattactttgagagccatcaccagcgactatgtcgtatgggtaaagcgcttatttattgagagaaatccgataaataagaagcatcaaag

SEQ ID NO: 2904 - DNA, 107 bp, Artificial Sequence; identical to SEQ ID NO: 475
  scaffold variant

SEQ ID NO: 2905 - DNA, 109 bp, Artificial Sequence
  scaffold variant
tactggcgcttttatctaattactttgagagccatcaccagcgactatgtcgtatgggtaaagcgcttatttatcggagagaaatcgcgataaataagaagcatcaaag

SEQ ID NO: 2906 - DNA, 109 bp, Artificial Sequence; identical to SEQ ID NO: 740
  scaffold variant

SEQ ID NO: 2907 - DNA, 106 bp, Artificial Sequence; identical to SEQ ID NO: 429
  scaffold variant

SEQ ID NO: 2908 - DNA, 108 bp, Artificial Sequence
  scaffold variant
tactggcgcttttatctcattactttgagagccatcaccagcgactatgtcgtatgggtaaagcgcttatttatcgagagaaatccgcataaataagaagcatcaaag

SEQ ID NO: 2909 - DNA, 109 bp, Artificial Sequence; identical to SEQ ID NO: 740
  scaffold variant

SEQ ID NO: 2910 - DNA, 107 bp, Artificial Sequence; identical to SEQ ID NO: 1036
  scaffold variant

SEQ ID NO: 2911 - DNA, 109 bp, Artificial Sequence; identical to SEQ ID NO: 740
  scaffold variant

SEQ ID NO: 2912 - DNA, 108 bp, Artificial Sequence
  scaffold variant
tactggcgcttttatctcattactttgagagccatcaccagcgactatgtcgtatgggtaaagcgcttatttaatcggagagaaatccataaataagaagcatcaaag

SEQ ID NO: 2913 - DNA, 107 bp, Artificial Sequence; identical to SEQ ID NO: 1691
  scaffold variant

SEQ ID NO: 2914 - DNA, 109 bp, Artificial Sequence; identical to SEQ ID NO: 912
  scaffold variant

SEQ ID NO: 2915 - DNA, 109 bp, Artificial Sequence; identical to SEQ ID NO: 941
  scaffold variant

SEQ ID NO: 2916 - DNA, 107 bp, Artificial Sequence
  scaffold variant
tactggcgcttttatctcattactttgagagccatcaccagcgactatgtcgtatgggtaaagcgcttatttatcgggaggaatccgataaataagaagcatcaaag

SEQ ID NO: 2917 - DNA, 109 bp, Artificial Sequence; identical to SEQ ID NO: 1010
  scaffold variant

SEQ ID NO: 2918 - DNA, 107 bp, Artificial Sequence
  scaffold variant
cctggcgcttttatcccattactttgagagccatcaccagcgactatgtcgtatgggtaaagcgcttatttatcggagagaaatccgataaataagaagcatcaaag

SEQ ID NO: 2919 - DNA, 109 bp, Artificial Sequence; identical to SEQ ID NO: 941
  scaffold variant

SEQ ID NO: 2920 - DNA, 107 bp, Artificial Sequence; identical to SEQ ID NO: 2398
  scaffold variant

SEQ ID NO: 2921 - DNA, 109 bp, Artificial Sequence; identical to SEQ ID NO: 1183
  scaffold variant

SEQ ID NO: 2922 - DNA, 107 bp, Artificial Sequence; identical to SEQ ID NO: 1691
  scaffold variant

SEQ ID NO: 2923 - DNA, 106 bp, Artificial Sequence
  scaffold variant
tggcgcttttatctcattactttgagagccatcaccagcgactatgtcgtatgggtaaagcgcttatttatctggagagaaatccgataaataagaagcatcaaag

SEQ ID NO: 2924 - DNA, 109 bp, Artificial Sequence; identical to SEQ ID NO: 2572
  scaffold variant

SEQ ID NO: 2925 - DNA, 106 bp, Artificial Sequence; identical to SEQ ID NO: 403
  scaffold variant

SEQ ID NO: 2926 - DNA, 107 bp, Artificial Sequence; identical to SEQ ID NO: 1678
  scaffold variant

SEQ ID NO: 2927 - DNA, 106 bp, Artificial Sequence; identical to SEQ ID NO: 1784
  scaffold variant

SEQ ID NO: 2928 - DNA, 109 bp, Artificial Sequence; identical to SEQ ID NO: 518
  scaffold variant

SEQ ID NO: 2929 - DNA, 107 bp, Artificial Sequence; identical to SEQ ID NO: 1915
  scaffold variant

SEQ ID NO: 2930 - DNA, 109 bp, Artificial Sequence; identical to SEQ ID NO: 740
  scaffold variant

SEQ ID NO: 2931 - DNA, 107 bp, Artificial Sequence; identical to SEQ ID NO: 2563
  scaffold variant

SEQ ID NO: 2932 - DNA, 107 bp, Artificial Sequence; identical to SEQ ID NO: 1262
  scaffold variant

SEQ ID NO: 2933 - DNA, 107 bp, Artificial Sequence; identical to SEQ ID NO: 1218
  scaffold variant

SEQ ID NO: 2934 - DNA, 108 bp, Artificial Sequence
  scaffold variant
tactggcgcttttatctcattactttgagagccatcaccagcgactatgtcgtatgggtaaagcgcttatttattgagagaaatcccgataaataagaagcatcaaag

SEQ ID NO: 2935 - DNA, 106 bp, Artificial Sequence; identical to SEQ ID NO: 862
  scaffold variant

SEQ ID NO: 2936 - DNA, 107 bp, Artificial Sequence; identical to SEQ ID NO: 915
  scaffold variant

SEQ ID NO: 2937 - DNA, 109 bp, Artificial Sequence; identical to SEQ ID NO: 980
  scaffold variant

SEQ ID NO: 2938 - DNA, 109 bp, Artificial Sequence; identical to SEQ ID NO: 1183
  scaffold variant

SEQ ID NO: 2939 - DNA, 107 bp, Artificial Sequence; identical to SEQ ID NO: 1262
  scaffold variant

SEQ ID NO: 2940 - DNA, 107 bp, Artificial Sequence; identical to SEQ ID NO: 1262
  scaffold variant

SEQ ID NO: 2941 - DNA, 107 bp, Artificial Sequence
  scaffold variant
cctggcgcttttatctcattactttgagagccatcaccagcgactatgtcgtatgggtaaagcacttatttatcggagagaaatccgataaataagaagcatcaaag

SEQ ID NO: 2942 - DNA, 107 bp, Artificial Sequence; identical to SEQ ID NO: 1678
  scaffold variant

SEQ ID NO: 2943 - DNA, 107 bp, Artificial Sequence; identical to SEQ ID NO: 833
  scaffold variant

SEQ ID NO: 2944 - DNA, 109 bp, Artificial Sequence; identical to SEQ ID NO: 740
  scaffold variant

SEQ ID NO: 2945 - DNA, 107 bp, Artificial Sequence; identical to SEQ ID NO: 972
  scaffold variant

SEQ ID NO: 2946 - DNA, 106 bp, Artificial Sequence; identical to SEQ ID NO: 484
  scaffold variant

SEQ ID NO: 2947 - DNA, 109 bp, Artificial Sequence; identical to SEQ ID NO: 1017
  scaffold variant

SEQ ID NO: 2948 - DNA, 107 bp, Artificial Sequence; identical to SEQ ID NO: 1844
  scaffold variant

SEQ ID NO: 2949 - DNA, 107 bp, Artificial Sequence; identical to SEQ ID NO: 972
  scaffold variant

SEQ ID NO: 2950 - DNA, 109 bp, Artificial Sequence; identical to SEQ ID NO: 947
  scaffold variant

SEQ ID NO: 2951 - DNA, 107 bp, Artificial Sequence; identical to SEQ ID NO: 1678
  scaffold variant

SEQ ID NO: 2952 - DNA, 107 bp, Artificial Sequence; identical to SEQ ID NO: 1915
  scaffold variant

SEQ ID NO: 2953 - DNA, 107 bp, Artificial Sequence; identical to SEQ ID NO: 833
  scaffold variant

SEQ ID NO: 2954 - DNA, 107 bp, Artificial Sequence
  scaffold variant
tactggcgcttttatctcattactttgagagccatcaccagcgactatgtcgtattggtaaagcgcttatttatcgagagaaatccgataaataagaagcatcaaag

SEQ ID NO: 2955 - DNA, 107 bp, Artificial Sequence; identical to SEQ ID NO: 1036
  scaffold variant

SEQ ID NO: 2956 - DNA, 107 bp, Artificial Sequence; identical to SEQ ID NO: 972
  scaffold variant

SEQ ID NO: 2957 - DNA, 108 bp, Artificial Sequence
  scaffold variant
tactggcgcttttatctcattactttgagagccatcaccagcgactatgtcgtatgggtaaagcgcttattttatcggagagaaatccataaataagaagcatcaaag

SEQ ID NO: 2958 - DNA, 106 bp, Artificial Sequence
  scaffold variant
tactggcgcttttatctcattactttgagagccatcaccagcgactatgtcgtatgggtaaagcggtatttatcggaagaaatccgataaataagaagcatcaaag

SEQ ID NO: 2959 - DNA, 107 bp, Artificial Sequence; identical to SEQ ID NO: 972
  scaffold variant

SEQ ID NO: 2960 - DNA, 108 bp, Artificial Sequence
  scaffold variant
tactggcgcttttatctcattactttgagagccatcaccagcgactatgtcgtatgggtaaagcgcttatttaatcggagagaaatcgataaataagaagcatcaaag

SEQ ID NO: 2961 - DNA, 107 bp, Artificial Sequence; identical to SEQ ID NO: 972
  scaffold variant

SEQ ID NO: 2962 - DNA, 109 bp, Artificial Sequence; identical to SEQ ID NO: 740
  scaffold variant

SEQ ID NO: 2963 - DNA, 107 bp, Artificial Sequence; identical to SEQ ID NO: 1218
  scaffold variant

SEQ ID NO: 2964 - DNA, 109 bp, Artificial Sequence; identical to SEQ ID NO: 980
  scaffold variant

SEQ ID NO: 2965 - DNA, 109 bp, Artificial Sequence; identical to SEQ ID NO: 740
  scaffold variant

SEQ ID NO: 2966 - DNA, 110 bp, Artificial Sequence
  scaffold variant
tactggcgcttttatctcattactttgagagccatcaccagcgactatgtcgtatgggtaaagcgcttatttattcggagagaaatgccgataaataagaagcatcaaag

SEQ ID NO: 2967 - DNA, 109 bp, Artificial Sequence; identical to SEQ ID NO: 1119
  scaffold variant

SEQ ID NO: 2968 - DNA, 107 bp, Artificial Sequence; identical to SEQ ID NO: 1915
  scaffold variant

SEQ ID NO: 2969 - DNA, 109 bp, Artificial Sequence; identical to SEQ ID NO: 980
  scaffold variant

SEQ ID NO: 2970 - DNA, 107 bp, Artificial Sequence; identical to SEQ ID NO: 2413
  scaffold variant

SEQ ID NO: 2971 - DNA, 109 bp, Artificial Sequence
  scaffold variant
tactggcgcttttatctcattactttgagagccatcaccagcgactatgtcgtatgggtaaagcgcttatttatccggagggaaatccgataaataagaagcatcaaag

SEQ ID NO: 2972 - DNA, 107 bp, Artificial Sequence; identical to SEQ ID NO: 2413
  scaffold variant

SEQ ID NO: 2973 - DNA, 107 bp, Artificial Sequence
  scaffold variant
cctggcgcttttatctaattactttgagagccatcaccagcgactatgtcgtatgggtaaagcgcttatttatcggagagaaatccgataaataagaagcatcaaag

SEQ ID NO: 2974 - DNA, 108 bp, Artificial Sequence
  scaffold variant
tactggcgcttttatctcattactttgagagccatcaccagcgactatgtcgtatgggtaaagcgcttattctatcggagagaaatcgataaataagaagcatcaaag

SEQ ID NO: 2975 - DNA, 106 bp, Artificial Sequence; identical to SEQ ID NO: 459
  scaffold variant

SEQ ID NO: 2976 - DNA, 107 bp, Artificial Sequence; identical to SEQ ID NO: 1707
  scaffold variant

SEQ ID NO: 2977 - DNA, 106 bp, Artificial Sequence; identical to SEQ ID NO: 385
  scaffold variant

SEQ ID NO: 2978 - DNA, 107 bp, Artificial Sequence; identical to SEQ ID NO: 1036
  scaffold variant

SEQ ID NO: 2979 - DNA, 107 bp, Artificial Sequence; identical to SEQ ID NO: 972
  scaffold variant

SEQ ID NO: 2980 - DNA, 107 bp, Artificial Sequence; identical to SEQ ID NO: 1678
  scaffold variant

SEQ ID NO: 2981 - DNA, 109 bp, Artificial Sequence; identical to SEQ ID NO: 1004
  scaffold variant

SEQ ID NO: 2982 - DNA, 109 bp, Artificial Sequence; identical to SEQ ID NO: 1145
  scaffold variant

SEQ ID NO: 2983 - DNA, 107 bp, Artificial Sequence; identical to SEQ ID NO: 1262
  scaffold variant

SEQ ID NO: 2984 - DNA, 107 bp, Artificial Sequence; identical to SEQ ID NO: 1844
  scaffold variant

SEQ ID NO: 2985 - DNA, 109 bp, Artificial Sequence; identical to SEQ ID NO: 1145
  scaffold variant

SEQ ID NO: 2986 - DNA, 107 bp, Artificial Sequence; identical to SEQ ID NO: 915
  scaffold variant

SEQ ID NO: 2987 - DNA, 107 bp, Artificial Sequence; identical to SEQ ID NO: 1337
  scaffold variant

SEQ ID NO: 2988 - DNA, 107 bp, Artificial Sequence; identical to SEQ ID NO: 1097
  scaffold variant

SEQ ID NO: 2989 - DNA, 108 bp, Artificial Sequence
  scaffold variant
tactggcgcttttatctcattactttgagagccatcaccagcgactatgtcgtatgggtaaagcgcttattttatcggagaggatccgataaataagaagcatcaaag

SEQ ID NO: 2990 - DNA, 106 bp, Artificial Sequence; identical to SEQ ID NO: 401
  scaffold variant

SEQ ID NO: 2991 - DNA, 107 bp, Artificial Sequence; identical to SEQ ID NO: 1218
  scaffold variant

SEQ ID NO: 2992 - DNA, 107 bp, Artificial Sequence; identical to SEQ ID NO: 2413
  scaffold variant

SEQ ID NO: 2993 - DNA, 107 bp, Artificial Sequence
  scaffold variant
tactggcgcttttatttcattactttgagagccatcaccagcgactatgtcgtatgggtaaagcgcttatttatccagagaaatccgataaataagaagcatcaaag

SEQ ID NO: 2994 - DNA, 106 bp, Artificial Sequence; identical to SEQ ID NO: 1784
  scaffold variant

SEQ ID NO: 2995 - DNA, 106 bp, Artificial Sequence; identical to SEQ ID NO: 494
  scaffold variant

SEQ ID NO: 2996 - DNA, 106 bp, Artificial Sequence; identical to SEQ ID NO: 1934
  scaffold variant

SEQ ID NO: 2997 - DNA, 109 bp, Artificial Sequence; identical to SEQ ID NO: 1183
  scaffold variant

SEQ ID NO: 2998 - DNA, 109 bp, Artificial Sequence; identical to SEQ ID NO: 1555
  scaffold variant

SEQ ID NO: 2999 - DNA, 110 bp, Artificial Sequence
  scaffold variant
tactggcgcttttatctcattactttgagagccatcaccagcgactatgtcgtatgggtaaagcgcttatttatacggagagaaatccgataaataagaagcatcaaagc

SEQ ID NO: 3000 - DNA, 109 bp, Artificial Sequence
  scaffold variant
tactggcgcttttatctcattactttgagagccatcaccagcgactatgtagtatgggtaaagcgcttatttatgcggagagaaatccgataaataagaagcatcaaag

SEQ ID NO: 3001 - DNA, 107 bp, Artificial Sequence; identical to SEQ ID NO: 1678
  scaffold variant

SEQ ID NO: 3002 - DNA, 107 bp, Artificial Sequence; identical to SEQ ID NO: 765
  scaffold variant

SEQ ID NO: 3003 - DNA, 107 bp, Artificial Sequence; identical to SEQ ID NO: 1262
  scaffold variant

SEQ ID NO: 3004 - DNA, 109 bp, Artificial Sequence; identical to SEQ ID NO: 1145
  scaffold variant

SEQ ID NO: 3005 - DNA, 106 bp, Artificial Sequence; identical to SEQ ID NO: 2350
  scaffold variant

SEQ ID NO: 3006 - DNA, 107 bp, Artificial Sequence; identical to SEQ ID NO: 990
  scaffold variant

SEQ ID NO: 3007 - DNA, 107 bp, Artificial Sequence; identical to SEQ ID NO: 1844
  scaffold variant

SEQ ID NO: 3008 - DNA, 109 bp, Artificial Sequence; identical to SEQ ID NO: 980
  scaffold variant

SEQ ID NO: 3009 - DNA, 108 bp, Artificial Sequence; identical to SEQ ID NO: 442
  scaffold variant

SEQ ID NO: 3010 - DNA, 107 bp, Artificial Sequence; identical to SEQ ID NO: 1691
  scaffold variant

SEQ ID NO: 3011 - DNA, 109 bp, Artificial Sequence; identical to SEQ ID NO: 980
  scaffold variant

SEQ ID NO: 3012 - DNA, 109 bp, Artificial Sequence; identical to SEQ ID NO: 740
  scaffold variant

SEQ ID NO: 3013 - DNA, 106 bp, Artificial Sequence; identical to SEQ ID NO: 385
  scaffold variant

SEQ ID NO: 3014 - DNA, 108 bp, Artificial Sequence
  scaffold variant
tactggcgcttttatctcattactttgagagccatcaccagcgactatgtcgtatgggtaaagcgcttattttatcggagagaatccgataaataagaagcatcaaag

SEQ ID NO: 3015 - DNA, 108 bp, Artificial Sequence
  scaffold variant
tactggcgcttttatctcattactttgagagccatcaccagcgactatgtcgtatgggtaaagcgcttatttatctagagaaatccgataaataagaagcatcaaagc

SEQ ID NO: 3016 - DNA, 106 bp, Artificial Sequence; identical to SEQ ID NO: 371
  scaffold variant

SEQ ID NO: 3017 - DNA, 109 bp, Artificial Sequence
  scaffold variant
tactggcgcttttatctcattactttgagagccatcaccagcgactatgtcgtatgggtaaagcgcttatttattaggagagaaatccgataaataagaagcatcaaag

SEQ ID NO: 3018 - DNA, 107 bp, Artificial Sequence
  scaffold variant
tactggcgcttttatctaattactttgagagccatcaccagcgactatgtcgtatgggtaaagcgcttatttatctagagaaatccgataaataagaagcatcaaag

SEQ ID NO: 3019 - DNA, 109 bp, Artificial Sequence; identical to SEQ ID NO: 1145
  scaffold variant

SEQ ID NO: 3020 - DNA, 109 bp, Artificial Sequence; identical to SEQ ID NO: 1555
  scaffold variant

SEQ ID NO: 3021 - DNA, 107 bp, Artificial Sequence; identical to SEQ ID NO: 990
  scaffold variant

SEQ ID NO: 3022 - DNA, 108 bp, Artificial Sequence; identical to SEQ ID NO: 535
  scaffold variant

SEQ ID NO: 3023 - DNA, 109 bp, Artificial Sequence; identical to SEQ ID NO: 912
  scaffold variant

SEQ ID NO: 3024 - DNA, 109 bp, Artificial Sequence; identical to SEQ ID NO: 518
  scaffold variant

SEQ ID NO: 3025 - DNA, 107 bp, Artificial Sequence; identical to SEQ ID NO: 972
  scaffold variant

SEQ ID NO: 3026 - DNA, 107 bp, Artificial Sequence; identical to SEQ ID NO: 1757
  scaffold variant

SEQ ID NO: 3027 - DNA, 107 bp, Artificial Sequence; identical to SEQ ID NO: 915
  scaffold variant

SEQ ID NO: 3028 - DNA, 108 bp, Artificial Sequence; identical to SEQ ID NO: 404
  scaffold variant

SEQ ID NO: 3029 - DNA, 107 bp, Artificial Sequence; identical to SEQ ID NO: 2413
  scaffold variant

SEQ ID NO: 3030 - DNA, 109 bp, Artificial Sequence; identical to SEQ ID NO: 1010
  scaffold variant

SEQ ID NO: 3031 - DNA, 108 bp, Artificial Sequence; identical to SEQ ID NO: 1428
  scaffold variant

SEQ ID NO: 3032 - DNA, 109 bp, Artificial Sequence; identical to SEQ ID NO: 1145
  scaffold variant

SEQ ID NO: 3033 - DNA, 106 bp, Artificial Sequence
  scaffold variant
tactggcgcttttatctcattactttgagagccatcaccagcgactatgtcgtatgggtaaagctttatttatcgggagaaatccgataaataagaagcatcaaag

SEQ ID NO: 3034 - DNA, 109 bp, Artificial Sequence; identical to SEQ ID NO: 1010
  scaffold variant

SEQ ID NO: 3035 - DNA, 107 bp, Artificial Sequence; identical to SEQ ID NO: 1218
  scaffold variant

SEQ ID NO: 3036 - DNA, 107 bp, Artificial Sequence; identical to SEQ ID NO: 1337
  scaffold variant

SEQ ID NO: 3037 - DNA, 107 bp, Artificial Sequence; identical to SEQ ID NO: 1464
  scaffold variant

SEQ ID NO: 3038 - DNA, 107 bp, Artificial Sequence; identical to SEQ ID NO: 972
  scaffold variant

SEQ ID NO: 3039 - DNA, 107 bp, Artificial Sequence; identical to SEQ ID NO: 2398
  scaffold variant

SEQ ID NO: 3040 - DNA, 107 bp, Artificial Sequence; identical to SEQ ID NO: 990
  scaffold variant

SEQ ID NO: 3041 - DNA, 109 bp, Artificial Sequence; identical to SEQ ID NO: 1048
  scaffold variant

SEQ ID NO: 3042 - DNA, 107 bp, Artificial Sequence; identical to SEQ ID NO: 833
  scaffold variant

SEQ ID NO: 3043 - DNA, 109 bp, Artificial Sequence; identical to SEQ ID NO: 740
  scaffold variant

SEQ ID NO: 3044 - DNA, 107 bp, Artificial Sequence; identical to SEQ ID NO: 1844
  scaffold variant

SEQ ID NO: 3045 - DNA, 109 bp, Artificial Sequence; identical to SEQ ID NO: 980
  scaffold variant

SEQ ID NO: 3046 - DNA, 110 bp, Artificial Sequence
  scaffold variant
tactggcgcttttatctcattactttgagagccatcaccagcgactatgtcgtatgggtaaagcgcttatttagtcggagagaaatccgataaataagaagcatcaaagc

SEQ ID NO: 3047 - DNA, 106 bp, Artificial Sequence; identical to SEQ ID NO: 1784
  scaffold variant

SEQ ID NO: 3048 - DNA, 109 bp, Artificial Sequence; identical to SEQ ID NO: 1555
  scaffold variant

SEQ ID NO: 3049 - DNA, 109 bp, Artificial Sequence; identical to SEQ ID NO: 518
  scaffold variant

SEQ ID NO: 3050 - DNA, 109 bp, Artificial Sequence; identical to SEQ ID NO: 2073
  scaffold variant

SEQ ID NO: 3051 - DNA, 108 bp, Artificial Sequence
  scaffold variant
tactggcgcttttatctcattactttgagagccatcaccagcgactatgtcgtatgggtaaagcgcttattttatcggaggaaatccgataaataagaagcatcaaag

SEQ ID NO: 3052 - DNA, 106 bp, Artificial Sequence; identical to SEQ ID NO: 570
  scaffold variant

SEQ ID NO: 3053 - DNA, 106 bp, Artificial Sequence
  scaffold variant
tactggcgcttttatctcattactttgagagccatcaccagcgactatgtcgtatgggtaaagcggtatttatcggagagaatccgataaataagaagcatcaaag

SEQ ID NO: 3054 - DNA, 107 bp, Artificial Sequence; identical to SEQ ID NO: 1262
  scaffold variant

SEQ ID NO: 3055 - DNA, 109 bp, Artificial Sequence
  scaffold variant
tactggcgcctttatctcattactttgagagccatcaccagcgactatgtcgtatgggtaaagcgcttatttatcggagagaaatctcgataaataagaagcatcaaag

SEQ ID NO: 3056 - DNA, 108 bp, Artificial Sequence
  scaffold variant
tactggcgcttttatctcattactttgagagccatcaccagcgactatgtcgtatgggtaaagcgcttatttatcaagagaaatccgataaataagaagcatcaaagc

SEQ ID NO: 3057 - DNA, 107 bp, Artificial Sequence; identical to SEQ ID NO: 1262
  scaffold variant

SEQ ID NO: 3058 - DNA, 106 bp, Artificial Sequence
  scaffold variant
tactggcgcttttatctcattactttgagagccatcaccagcgactatgtcgtatgggtaaagcgcttattttcggagagaatccgataaataagaagcatcaaag

SEQ ID NO: 3059 - DNA, 107 bp, Artificial Sequence; identical to SEQ ID NO: 1337
  scaffold variant

SEQ ID NO: 3060 - DNA, 106 bp, Artificial Sequence; identical to SEQ ID NO: 401
  scaffold variant

SEQ ID NO: 3061 - DNA, 109 bp, Artificial Sequence; identical to SEQ ID NO: 980
  scaffold variant

SEQ ID NO: 3062 - DNA, 109 bp, Artificial Sequence; identical to SEQ ID NO: 1145
  scaffold variant

SEQ ID NO: 3063 - DNA, 107 bp, Artificial Sequence; identical to SEQ ID NO: 990
  scaffold variant

SEQ ID NO: 3064 - DNA, 107 bp, Artificial Sequence
  scaffold variant
catggcgcttttatctcattactttgagagccatcaccagcgactatgtcgtatgggtaaagcgcttatttatcggagagaaatccgataaataagaagcatcaaag

SEQ ID NO: 3065 - DNA, 108 bp, Artificial Sequence; identical to SEQ ID NO: 516
  scaffold variant

SEQ ID NO: 3066 - DNA, 108 bp, Artificial Sequence
  scaffold variant
tactggcgcttttatctcattactttgagagccatcaccagcgactatgtcgtatgggtaaagcgcttattttatcggagagtatccgataaataagaagcatcaaag

SEQ ID NO: 3067 - DNA, 107 bp, Artificial Sequence; identical to SEQ ID NO: 1844
  scaffold variant

SEQ ID NO: 3068 - DNA, 109 bp, Artificial Sequence; identical to SEQ ID NO: 2073
  scaffold variant

SEQ ID NO: 3069 - DNA, 107 bp, Artificial Sequence
  scaffold variant
cctggcgcttttatctcattactttgagagcaatcaccagcgactatgtcgtatgggtaaagcgcttatttatcggagagaaatccgataaataagaagcatcaaag

SEQ ID NO: 3070 - DNA, 107 bp, Artificial Sequence
  scaffold variant
tactggcgcttttatctcattactttgagagccatcaccagcgactatgtcgtatgggtaaagcgcttatttatcgagaggaatccgataaataagaagcatcaaag

SEQ ID NO: 3071 - DNA, 107 bp, Artificial Sequence; identical to SEQ ID NO: 972
  scaffold variant

SEQ ID NO: 3072 - DNA, 107 bp, Artificial Sequence; identical to SEQ ID NO: 1921
  scaffold variant

SEQ ID NO: 3073 - DNA, 109 bp, Artificial Sequence; identical to SEQ ID NO: 1177
  scaffold variant

SEQ ID NO: 3074 - DNA, 107 bp, Artificial Sequence
  scaffold variant
tactggcgcttttatctcattactttgagagccatcaccagcgactatgtcgtatgggtaaagctttatttatcggagagaaatccgataaataagaagcatcaaag

SEQ ID NO: 3075 - DNA, 106 bp, Artificial Sequence
  scaffold variant
tactggcgcttttatctcattactttgagagccatcaccagcgactatgtcgtatgggtaaagcgtatttatcggagagaaatccgataaataagaagcatcaaag

SEQ ID NO: 3076 - DNA, 109 bp, Artificial Sequence; identical to SEQ ID NO: 1183
  scaffold variant

SEQ ID NO: 3077 - DNA, 107 bp, Artificial Sequence; identical to SEQ ID NO: 1678
  scaffold variant

SEQ ID NO: 3078 - DNA, 107 bp, Artificial Sequence; identical to SEQ ID NO: 1262
  scaffold variant

SEQ ID NO: 3079 - DNA, 109 bp, Artificial Sequence
  scaffold variant
tactggcgcttttatctaattactttgagagccatcaccagcgactatgtcgtatgggtaaagcgcttatttattcggagagaaatccgataaataagaagcatcaaag

SEQ ID NO: 3080 - DNA, 106 bp, Artificial Sequence; identical to SEQ ID NO: 494
  scaffold variant

SEQ ID NO: 3081 - DNA, 108 bp, Artificial Sequence; identical to SEQ ID NO: 1879
  scaffold variant

SEQ ID NO: 3082 - DNA, 107 bp, Artificial Sequence; identical to SEQ ID NO: 1091
  scaffold variant

SEQ ID NO: 3083 - DNA, 106 bp, Artificial Sequence; identical to SEQ ID NO: 1934
  scaffold variant

SEQ ID NO: 3084 - DNA, 109 bp, Artificial Sequence; identical to SEQ ID NO: 980
  scaffold variant

SEQ ID NO: 3085 - DNA, 106 bp, Artificial Sequence; identical to SEQ ID NO: 1784
  scaffold variant

SEQ ID NO: 3086 - DNA, 109 bp, Artificial Sequence; identical to SEQ ID NO: 1177
  scaffold variant

SEQ ID NO: 3087 - DNA, 109 bp, Artificial Sequence
  scaffold variant
tactggcgcttttatctcattactttgagagccatcaccagcgactatgtcgtatgggtaaagcgcttatttatgcggagaggaatccgataaataagaagcatcaaag

SEQ ID NO: 3088 - DNA, 107 bp, Artificial Sequence; identical to SEQ ID NO: 1262
  scaffold variant

SEQ ID NO: 3089 - DNA, 107 bp, Artificial Sequence
  scaffold variant
tactggcgcttttatctcattactttgagagccatcaccagcgactatgtcgtatgggtaaagcgcttatttatcgagggaaatccgataaataagaagcatcaaag

SEQ ID NO: 3090 - DNA, 106 bp, Artificial Sequence; identical to SEQ ID NO: 631
  scaffold variant

SEQ ID NO: 3091 - DNA, 107 bp, Artificial Sequence
  scaffold variant
tactggcgcttttatctcattactttgagagccatcaccagcgactatgtcgtatgggtaaagcgcttatttatatagagaaatccgataaataagaagcatcaaag

SEQ ID NO: 3092 - DNA, 109 bp, Artificial Sequence; identical to SEQ ID NO: 1183
  scaffold variant

SEQ ID NO: 3093 - DNA, 107 bp, Artificial Sequence; identical to SEQ ID NO: 1691
  scaffold variant

SEQ ID NO: 3094 - DNA, 107 bp, Artificial Sequence; identical to SEQ ID NO: 1337
  scaffold variant

SEQ ID NO: 3095 - DNA, 109 bp, Artificial Sequence
  scaffold variant
tactggcgcttttatctcattactttgagagccatcaccagcgactatgtcgtatgggtaaagcgcttatttatcctgagagaaatccgataaataagaagcatcaaag

SEQ ID NO: 3096 - DNA, 107 bp, Artificial Sequence; identical to SEQ ID NO: 1691
  scaffold variant

SEQ ID NO: 3097 - DNA, 107 bp, Artificial Sequence; identical to SEQ ID NO: 2413
  scaffold variant

SEQ ID NO: 3098 - DNA, 106 bp, Artificial Sequence; identical to SEQ ID NO: 1784
  scaffold variant

SEQ ID NO: 3099 - DNA, 107 bp, Artificial Sequence
  scaffold variant
tactggcgcttttatctcattactttgagagccatcaccagcgactatgtcgtatgggtaaagcgcttatttatcgagagaaatccgataaataagaagcataaaag

SEQ ID NO: 3100 - DNA, 109 bp, Artificial Sequence; identical to SEQ ID NO: 2073
  scaffold variant

SEQ ID NO: 3101 - DNA, 109 bp, Artificial Sequence; identical to SEQ ID NO: 980
  scaffold variant

SEQ ID NO: 3102 - DNA, 107 bp, Artificial Sequence; identical to SEQ ID NO: 1097
  scaffold variant

SEQ ID NO: 3103 - DNA, 110 bp, Artificial Sequence
  scaffold variant
taactggcgcttttatctcattactttgagagccatcaccagcgactatgtcgtatgggtaaagcgcttattctatcggagagaaatccgataaataagaagcatcaaag

SEQ ID NO: 3104 - DNA, 107 bp, Artificial Sequence; identical to SEQ ID NO: 1844
  scaffold variant

SEQ ID NO: 3105 - DNA, 109 bp, Artificial Sequence; identical to SEQ ID NO: 980
  scaffold variant

SEQ ID NO: 3106 - DNA, 109 bp, Artificial Sequence; identical to SEQ ID NO: 518
  scaffold variant

SEQ ID NO: 3107 - DNA, 106 bp, Artificial Sequence
  scaffold variant
tactggcgcttttatctcattactttgagagccatcaccagcgactatgtcgtatgggtaaagcgcttatttatggagagaaatcgataaataagaagcatcaaag

SEQ ID NO: 3108 - DNA, 109 bp, Artificial Sequence; identical to SEQ ID NO: 912
  scaffold variant

SEQ ID NO: 3109 - DNA, 107 bp, Artificial Sequence
  scaffold variant
cctggcgcttttatcttattactttgagagccatcaccagcgactatgtcgtatgggtaaagcgcttatttatcggagagaaatccgataaataagaagcatcaaag

SEQ ID NO: 3110 - DNA, 109 bp, Artificial Sequence; identical to SEQ ID NO: 910
  scaffold variant

SEQ ID NO: 3111 - DNA, 109 bp, Artificial Sequence; identical to SEQ ID NO: 802
  scaffold variant

SEQ ID NO: 3112 - DNA, 107 bp, Artificial Sequence; identical to SEQ ID NO: 1757
  scaffold variant

SEQ ID NO: 3113 - DNA, 107 bp, Artificial Sequence; identical to SEQ ID NO: 972
  scaffold variant

SEQ ID NO: 3114 - DNA, 107 bp, Artificial Sequence; identical to SEQ ID NO: 1262
  scaffold variant

SEQ ID NO: 3115 - DNA, 109 bp, Artificial Sequence; identical to SEQ ID NO: 980
  scaffold variant

SEQ ID NO: 3116 - DNA, 107 bp, Artificial Sequence; identical to SEQ ID NO: 1678
  scaffold variant

SEQ ID NO: 3117 - DNA, 109 bp, Artificial Sequence; identical to SEQ ID NO: 2666
  scaffold variant

SEQ ID NO: 3118 - DNA, 107 bp, Artificial Sequence; identical to SEQ ID NO: 990
  scaffold variant

SEQ ID NO: 3119 - DNA, 109 bp, Artificial Sequence; identical to SEQ ID NO: 802
  scaffold variant

SEQ ID NO: 3120 - DNA, 107 bp, Artificial Sequence; identical to SEQ ID NO: 1844
  scaffold variant

SEQ ID NO: 3121 - DNA, 107 bp, Artificial Sequence; identical to SEQ ID NO: 1426
  scaffold variant

SEQ ID NO: 3122 - DNA, 106 bp, Artificial Sequence
  scaffold variant
tactggcgcttttatctcattactttgagagccatcaccagcgactatgtcgtatgggtaaagccttatttatcgagagaaatccgataaataagaagcatcaaag

SEQ ID NO: 3123 - DNA, 107 bp, Artificial Sequence
  scaffold variant
tactggcgcttttatctcattactttgagagccatcaccagcgactatgtcgtatgggtaaagctcttatttatcgagagaaatccgataaataagaagcatcaaag

SEQ ID NO: 3124 - DNA, 107 bp, Artificial Sequence; identical to SEQ ID NO: 1915
  scaffold variant

SEQ ID NO: 3125 - DNA, 109 bp, Artificial Sequence; identical to SEQ ID NO: 2073
  scaffold variant

SEQ ID NO: 3126 - DNA, 107 bp, Artificial Sequence
  scaffold variant
tactggcgcttttatctcattactttgagagccatcaccagcgactatgtcgtatgggtaaagcgcttatttaccgagagaaatccgataaataagaagcatcaaag

SEQ ID NO: 3127 - DNA, 107 bp, Artificial Sequence; identical to SEQ ID NO: 972
  scaffold variant

SEQ ID NO: 3128 - DNA, 107 bp, Artificial Sequence; identical to SEQ ID NO: 1091
  scaffold variant

SEQ ID NO: 3129 - DNA, 109 bp, Artificial Sequence; identical to SEQ ID NO: 1183
  scaffold variant

SEQ ID NO: 3130 - DNA, 107 bp, Artificial Sequence; identical to SEQ ID NO: 1337
  scaffold variant

SEQ ID NO: 3131 - DNA, 109 bp, Artificial Sequence; identical to SEQ ID NO: 1145
  scaffold variant

SEQ ID NO: 3132 - DNA, 107 bp, Artificial Sequence; identical to SEQ ID NO: 972
  scaffold variant

SEQ ID NO: 3133 - DNA, 107 bp, Artificial Sequence; identical to SEQ ID NO: 972
  scaffold variant

SEQ ID NO: 3134 - DNA, 107 bp, Artificial Sequence; identical to SEQ ID NO: 1678
  scaffold variant

SEQ ID NO: 3135 - DNA, 107 bp, Artificial Sequence; identical to SEQ ID NO: 1262
  scaffold variant

SEQ ID NO: 3136 - DNA, 107 bp, Artificial Sequence; identical to SEQ ID NO: 1337
  scaffold variant

SEQ ID NO: 3137 - DNA, 107 bp, Artificial Sequence; identical to SEQ ID NO: 1218
  scaffold variant

SEQ ID NO: 3138 - DNA, 107 bp, Artificial Sequence; identical to SEQ ID NO: 1262
  scaffold variant

SEQ ID NO: 3139 - DNA, 107 bp, Artificial Sequence; identical to SEQ ID NO: 972
  scaffold variant

SEQ ID NO: 3140 - DNA, 107 bp, Artificial Sequence
  scaffold variant
tactggcgcttttatctcattactttgagagccatcaccagcgactatgtcgtatgggtaaagcgcttatttatcgagagaaatcagataaataagaagcatcaaag

SEQ ID NO: 3141 - DNA, 108 bp, Artificial Sequence
  scaffold variant
tactggcgcttttatctcattactttgagagccatcaccagcgactatgtcgtatgggtaaagcgcttattatatcggagagaatccgataaataagaagcatcaaag

SEQ ID NO: 3142 - DNA, 107 bp, Artificial Sequence; identical to SEQ ID NO: 1921
  scaffold variant

SEQ ID NO: 3143 - DNA, 106 bp, Artificial Sequence
  scaffold variant
tactggcgcttttatctcattactttgagagccatcaccagcgactatgtcgtatgggtaaagcgcttatttgcggagagaaatccataaataagaagcatcaaag

SEQ ID NO: 3144 - DNA, 106 bp, Artificial Sequence
  scaffold variant
tactggcgcttttatctcattactttgagagccatcaccagcgactatgtcgtatgggtaaagcgcttatttatcgggagaaatccataaataagaagcatcaaag

SEQ ID NO: 3145 - DNA, 109 bp, Artificial Sequence
  scaffold variant
tactggcgcttttatctcattactttgagagccatcaccagcgactatgtcgtatgggtaaagcgcttatttattgagagagaaatccgataaataagaagcatcaaag

SEQ ID NO: 3146 - DNA, 107 bp, Artificial Sequence; identical to SEQ ID NO: 1844
  scaffold variant

SEQ ID NO: 3147 - DNA, 107 bp, Artificial Sequence
  scaffold variant
tactggcgcttttatctcattactttgagagccatcaccagcgactatgtcgtatgggtaaagcgcttatttatcgagagaaatacgataaataagaagcatcaaag

SEQ ID NO: 3148 - DNA, 106 bp, Artificial Sequence; identical to SEQ ID NO: 618
  scaffold variant

SEQ ID NO: 3149 - DNA, 109 bp, Artificial Sequence; identical to SEQ ID NO: 1183
  scaffold variant

SEQ ID NO: 3150 - DNA, 109 bp, Artificial Sequence; identical to SEQ ID NO: 802
  scaffold variant

SEQ ID NO: 3151 - DNA, 107 bp, Artificial Sequence; identical to SEQ ID NO: 833
  scaffold variant

SEQ ID NO: 3152 - DNA, 107 bp, Artificial Sequence; identical to SEQ ID NO: 833
  scaffold variant

SEQ ID NO: 3153 - DNA, 107 bp, Artificial Sequence; identical to SEQ ID NO: 1844
  scaffold variant

SEQ ID NO: 3154 - DNA, 107 bp, Artificial Sequence; identical to SEQ ID NO: 1426
  scaffold variant

SEQ ID NO: 3155 - DNA, 107 bp, Artificial Sequence; identical to SEQ ID NO: 1218
  scaffold variant

SEQ ID NO: 3156 - DNA, 107 bp, Artificial Sequence; identical to SEQ ID NO: 1091
  scaffold variant

SEQ ID NO: 3157 - DNA, 110 bp, Artificial Sequence
  scaffold variant
tactggcgcttttatctcattactttgagagccatcaccagcgactatgtcgtatgggtaaagcgcttatttatccggagagaaatccgcataaataagaagcatcaaag

SEQ ID NO: 3158 - DNA, 109 bp, Artificial Sequence; identical to SEQ ID NO: 1010
  scaffold variant

SEQ ID NO: 3159 - DNA, 107 bp, Artificial Sequence; identical to SEQ ID NO: 1921
  scaffold variant

SEQ ID NO: 3160 - DNA, 107 bp, Artificial Sequence; identical to SEQ ID NO: 833
  scaffold variant

SEQ ID NO: 3161 - DNA, 107 bp, Artificial Sequence; identical to SEQ ID NO: 1262
  scaffold variant

SEQ ID NO: 3162 - DNA, 107 bp, Artificial Sequence; identical to SEQ ID NO: 1757
  scaffold variant

SEQ ID NO: 3163 - DNA, 109 bp, Artificial Sequence; identical to SEQ ID NO: 910
  scaffold variant

SEQ ID NO: 3164 - DNA, 106 bp, Artificial Sequence; identical to SEQ ID NO: 1784
  scaffold variant

SEQ ID NO: 3165 - DNA, 109 bp, Artificial Sequence; identical to SEQ ID NO: 802
  scaffold variant

SEQ ID NO: 3166 - DNA, 107 bp, Artificial Sequence
  scaffold variant
tactggcgcttttatctcattactttgagagccatcaccagcgactatgtcgtatgggtaaagcgcttatttatcgagagaaatccgataaataagaagaatcaaag

SEQ ID NO: 3167 - DNA, 107 bp, Artificial Sequence; identical to SEQ ID NO: 1757
  scaffold variant

SEQ ID NO: 3168 - DNA, 107 bp, Artificial Sequence; identical to SEQ ID NO: 833
  scaffold variant

SEQ ID NO: 3169 - DNA, 109 bp, Artificial Sequence
  scaffold variant
tactggcgcttttatctcattactttgagagccatcaccagcgactatgtcgtattggtaaagcgcttatttatgcggagagaaatccgataaataagaagcatcaaag

SEQ ID NO: 3170 - DNA, 108 bp, Artificial Sequence; identical to SEQ ID NO: 473
  scaffold variant

SEQ ID NO: 3171 - DNA, 109 bp, Artificial Sequence; identical to SEQ ID NO: 802
  scaffold variant

SEQ ID NO: 3172 - DNA, 107 bp, Artificial Sequence; identical to SEQ ID NO: 1337
  scaffold variant

SEQ ID NO: 3173 - DNA, 107 bp, Artificial Sequence; identical to SEQ ID NO: 1426
  scaffold variant

SEQ ID NO: 3174 - DNA, 107 bp, Artificial Sequence; identical to SEQ ID NO: 1757
  scaffold variant

SEQ ID NO: 3175 - DNA, 109 bp, Artificial Sequence; identical to SEQ ID NO: 1183
  scaffold variant

SEQ ID NO: 3176 - DNA, 108 bp, Artificial Sequence; identical to SEQ ID NO: 376
  scaffold variant

SEQ ID NO: 3177 - DNA, 107 bp, Artificial Sequence; identical to SEQ ID NO: 2413
  scaffold variant

SEQ ID NO: 3178 - DNA, 107 bp, Artificial Sequence; identical to SEQ ID NO: 2413
  scaffold variant

SEQ ID NO: 3179 - DNA, 107 bp, Artificial Sequence; identical to SEQ ID NO: 2398
  scaffold variant

SEQ ID NO: 3180 - DNA, 108 bp, Artificial Sequence
  scaffold variant
tactggcgcttttatctcattactttgagagccatcaccagcgactatgtcgtatgggtaaagcgcttatttacggagagaaatccgataaataagaagcatcaaagc

SEQ ID NO: 3181 - DNA, 107 bp, Artificial Sequence
  scaffold variant
cctggcgcttttatctcattactttgagagccatcaccagcgactatgtcgtatggttaaagcgcttatttatcggagagaaatccgataaataagaagcatcaaag

SEQ ID NO: 3182 - DNA, 106 bp, Artificial Sequence; identical to SEQ ID NO: 1784
  scaffold variant

SEQ ID NO: 3183 - DNA, 107 bp, Artificial Sequence; identical to SEQ ID NO: 1691
  scaffold variant

SEQ ID NO: 3184 - DNA, 107 bp, Artificial Sequence; identical to SEQ ID NO: 1844
  scaffold variant

SEQ ID NO: 3185 - DNA, 109 bp, Artificial Sequence; identical to SEQ ID NO: 1183
  scaffold variant

SEQ ID NO: 3186 - DNA, 109 bp, Artificial Sequence; identical to SEQ ID NO: 910
  scaffold variant

SEQ ID NO: 3187 - DNA, 107 bp, Artificial Sequence; identical to SEQ ID NO: 1844
  scaffold variant

SEQ ID NO: 3188 - DNA, 107 bp, Artificial Sequence; identical to SEQ ID NO: 2413
  scaffold variant

SEQ ID NO: 3189 - DNA, 107 bp, Artificial Sequence
  scaffold variant
tactggcgcttttatctaattactttgagagccatcaccagcgactatgtcgtatgggtaaagcgcttattttcggagagaaatccgataaataagaagcatcaaag

SEQ ID NO: 3190 - DNA, 107 bp, Artificial Sequence; identical to SEQ ID NO: 1757
  scaffold variant

SEQ ID NO: 3191 - DNA, 107 bp, Artificial Sequence; identical to SEQ ID NO: 1691
  scaffold variant

SEQ ID NO: 3192 - DNA, 107 bp, Artificial Sequence; identical to SEQ ID NO: 1262
  scaffold variant

SEQ ID NO: 3193 - DNA, 107 bp, Artificial Sequence; identical to SEQ ID NO: 833
  scaffold variant

SEQ ID NO: 3194 - DNA, 107 bp, Artificial Sequence; identical to SEQ ID NO: 1757
  scaffold variant

SEQ ID NO: 3195 - DNA, 107 bp, Artificial Sequence; identical to SEQ ID NO: 1097
  scaffold variant

SEQ ID NO: 3196 - DNA, 107 bp, Artificial Sequence; identical to SEQ ID NO: 1844
  scaffold variant

SEQ ID NO: 3197 - DNA, 107 bp, Artificial Sequence; identical to SEQ ID NO: 1426
  scaffold variant

SEQ ID NO: 3198 - DNA, 107 bp, Artificial Sequence; identical to SEQ ID NO: 833
  scaffold variant

SEQ ID NO: 3199 - DNA, 107 bp, Artificial Sequence; identical to SEQ ID NO: 1915
  scaffold variant

SEQ ID NO: 3200 - DNA, 107 bp, Artificial Sequence; identical to SEQ ID NO: 1691
  scaffold variant

SEQ ID NO: 3201 - DNA, 109 bp, Artificial Sequence; identical to SEQ ID NO: 980
  scaffold variant

SEQ ID NO: 3202 - DNA, 107 bp, Artificial Sequence; identical to SEQ ID NO: 1757
  scaffold variant

SEQ ID NO: 3203 - DNA, 107 bp, Artificial Sequence; identical to SEQ ID NO: 1426
  scaffold variant

SEQ ID NO: 3204 - DNA, 107 bp, Artificial Sequence; identical to SEQ ID NO: 1464
  scaffold variant

SEQ ID NO: 3205 - DNA, 107 bp, Artificial Sequence; identical to SEQ ID NO: 1036
  scaffold variant

SEQ ID NO: 3206 - DNA, 109 bp, Artificial Sequence; identical to SEQ ID NO: 802
  scaffold variant

SEQ ID NO: 3207 - DNA, 107 bp, Artificial Sequence; identical to SEQ ID NO: 1337
  scaffold variant

SEQ ID NO: 3208 - DNA, 107 bp, Artificial Sequence; identical to SEQ ID NO: 1036
  scaffold variant

SEQ ID NO: 3209 - DNA, 109 bp, Artificial Sequence; identical to SEQ ID NO: 1004
  scaffold variant

SEQ ID NO: 3210 - DNA, 107 bp, Artificial Sequence; identical to SEQ ID NO: 1844
  scaffold variant

SEQ ID NO: 3211 - DNA, 107 bp, Artificial Sequence; identical to SEQ ID NO: 1218
  scaffold variant

SEQ ID NO: 3212 - DNA, 107 bp, Artificial Sequence; identical to SEQ ID NO: 1757
  scaffold variant

SEQ ID NO: 3213 - DNA, 107 bp, Artificial Sequence; identical to SEQ ID NO: 990
  scaffold variant

SEQ ID NO: 3214 - DNA, 109 bp, Artificial Sequence; identical to SEQ ID NO: 912
  scaffold variant

SEQ ID NO: 3215 - DNA, 107 bp, Artificial Sequence; identical to SEQ ID NO: 1262
  scaffold variant

SEQ ID NO: 3216 - DNA, 109 bp, Artificial Sequence; identical to SEQ ID NO: 912
  scaffold variant

SEQ ID NO: 3217 - DNA, 107 bp, Artificial Sequence; identical to SEQ ID NO: 1262
  scaffold variant

SEQ ID NO: 3218 - DNA, 108 bp, Artificial Sequence; identical to SEQ ID NO: 473
  scaffold variant

SEQ ID NO: 3219 - DNA, 107 bp, Artificial Sequence
  scaffold variant
tactggcgcttttatctcattactttgagagccatcaccagcgactatgtcgtatgggtaaagcgcttatttatctggagaaatccgataaataagaagcatcaaag

SEQ ID NO: 3220 - DNA, 107 bp, Artificial Sequence
  scaffold variant
tactggcgcttttatctcattactttgagagccataaccagcgactatgtcgtatgggtaaagcgcttatttatcaagagaaatccgataaataagaagcatcaaag

SEQ ID NO: 3221 - DNA, 107 bp, Artificial Sequence; identical to SEQ ID NO: 1921
  scaffold variant

SEQ ID NO: 3222 - DNA, 108 bp, Artificial Sequence
  scaffold variant
tactggcgcttttatctcattactttgagagccatcaccagcgactatgtcgtatgggtaaagcgcttatttacggagagaaatccgcataaataagaagcatcaaag

SEQ ID NO: 3223 - DNA, 109 bp, Artificial Sequence; identical to SEQ ID NO: 1145
  scaffold variant

SEQ ID NO: 3224 - DNA, 107 bp, Artificial Sequence; identical to SEQ ID NO: 1036
  scaffold variant

SEQ ID NO: 3225 - DNA, 107 bp, Artificial Sequence
  scaffold variant
tactggctcttttatctcattactttgagagccatcaccagcgactatgtcgtatgggtaaagcgcttatttatcgagagaaatccgataaataagaagcatcaaag

SEQ ID NO: 3226 - DNA, 107 bp, Artificial Sequence; identical to SEQ ID NO: 1678
  scaffold variant

SEQ ID NO: 3227 - DNA, 109 bp, Artificial Sequence
  scaffold variant
tactggcgcttttatctcattactttgagagccatcaccagcgactatgtcgtatgggtaaagcgcttatttataggagagaaatcgcgataaataagaagcatcaaag

SEQ ID NO: 3228 - DNA, 107 bp, Artificial Sequence; identical to SEQ ID NO: 2413
  scaffold variant

SEQ ID NO: 3229 - DNA, 109 bp, Artificial Sequence; identical to SEQ ID NO: 1555
  scaffold variant

SEQ ID NO: 3230 - DNA, 107 bp, Artificial Sequence; identical to SEQ ID NO: 1091
  scaffold variant

SEQ ID NO: 3231 - DNA, 107 bp, Artificial Sequence; identical to SEQ ID NO: 1091
  scaffold variant

SEQ ID NO: 3232 - DNA, 107 bp, Artificial Sequence; identical to SEQ ID NO: 1036
  scaffold variant

SEQ ID NO: 3233 - DNA, 107 bp, Artificial Sequence; identical to SEQ ID NO: 1036
  scaffold variant

SEQ ID NO: 3234 - DNA, 107 bp, Artificial Sequence; identical to SEQ ID NO: 1921
  scaffold variant

SEQ ID NO: 3235 - DNA, 107 bp, Artificial Sequence; identical to SEQ ID NO: 1921
  scaffold variant

SEQ ID NO: 3236 - DNA, 107 bp, Artificial Sequence; identical to SEQ ID NO: 833
  scaffold variant

SEQ ID NO: 3237 - DNA, 109 bp, Artificial Sequence; identical to SEQ ID NO: 980
  scaffold variant

SEQ ID NO: 3238 - DNA, 109 bp, Artificial Sequence; identical to SEQ ID NO: 802
  scaffold variant

SEQ ID NO: 3239 - DNA, 107 bp, Artificial Sequence
  scaffold variant
tactggcgcttttatctcattactttgagagccatcaccagcgactatgtagtatgggtaaagcgcttatttatcgagagaaatccgataaataagaagcatcaaag

SEQ ID NO: 3240 - DNA, 107 bp, Artificial Sequence; identical to SEQ ID NO: 1757
  scaffold variant

SEQ ID NO: 3241 - DNA, 107 bp, Artificial Sequence; identical to SEQ ID NO: 1036
  scaffold variant

SEQ ID NO: 3242 - DNA, 107 bp, Artificial Sequence; identical to SEQ ID NO: 1036
  scaffold variant

SEQ ID NO: 3243 - DNA, 107 bp, Artificial Sequence; identical to SEQ ID NO: 1921
  scaffold variant

SEQ ID NO: 3244 - DNA, 107 bp, Artificial Sequence; identical to SEQ ID NO: 1691
  scaffold variant

SEQ ID NO: 3245 - DNA, 107 bp, Artificial Sequence
  scaffold variant
tactggcgcttttatctaattactttgagagccatcaccagcgactatgtcgtatgggtaaagcgcttatttatcggagagaaatcgataaataagaagcatcaaag

SEQ ID NO: 3246 - DNA, 107 bp, Artificial Sequence; identical to SEQ ID NO: 1921
  scaffold variant

SEQ ID NO: 3247 - DNA, 107 bp, Artificial Sequence
  scaffold variant
tactggcgcttttatctcattactttgagagccatcaccagcgactatgtcgtatgggtaaagcgcttatttatcgggggaaatccgataaataagaagcatcaaag

SEQ ID NO: 3248 - DNA, 107 bp, Artificial Sequence; identical to SEQ ID NO: 1036
  scaffold variant

SEQ ID NO: 3249 - DNA, 107 bp, Artificial Sequence; identical to SEQ ID NO: 1218
  scaffold variant

SEQ ID NO: 3250 - DNA, 109 bp, Artificial Sequence; identical to SEQ ID NO: 912
  scaffold variant

SEQ ID NO: 3251 - protein, 4 aa, Artificial Sequence
  DME variant reference
GSPG

SEQ ID NO: 3252 - protein, 5 aa, Artificial Sequence
  DME variant reference
ALSDA

SEQ ID NO: 3253 - protein, 4 aa, Artificial Sequence
  DME variant reference
AYEG

SEQ ID NO: 3254 - protein, 4 aa, Artificial Sequence
  DME variant reference
DLLY

SEQ ID NO: 3255 - protein, 4 aa, Artificial Sequence
  DME variant reference
EAFE

SEQ ID NO: 3256 - protein, 10 aa, Artificial Sequence
  DME variant reference
EAWERIDKKV

SEQ ID NO: 3257 - protein, 4 aa, Artificial Sequence
  DME variant reference
ELDR

SEQ ID NO: 3258 - protein, 7 aa, Artificial Sequence
  DME variant reference
FMAERQY

SEQ ID NO: 3259 - protein, 4 aa, Artificial Sequence
  DME variant reference
FVAL

SEQ ID NO: 3260 - protein, 4 aa, Artificial Sequence
  DME variant reference
GCPL

SEQ ID NO: 3261 - protein, 7 aa, Artificial Sequence
  DME variant reference
GGKLRFK

SEQ ID NO: 3262 - protein, 11 aa, Artificial Sequence
  DME variant reference
GKFGQRALDFY

SEQ ID NO: 3263 - protein, 4 aa, Artificial Sequence
  DME variant reference
GNPT

SEQ ID NO: 3264 - protein, 10 aa, Artificial Sequence
  DME variant reference
HTNYFGRCNV

SEQ ID NO: 3265 - protein, 4 aa, Artificial Sequence
  DME variant reference
ILRI

SEQ ID NO: 3266 - protein, 7 aa, Artificial Sequence
  DME variant reference
KDSNTKK

SEQ ID NO: 3267 - protein, 5 aa, Artificial Sequence
  DME variant reference
KGFPS

SEQ ID NO: 3268 - protein, 5 aa, Artificial Sequence
  DME variant reference
KKHGE

SEQ ID NO: 3269 - protein, 8 aa, Artificial Sequence
  DME variant reference
KKHGEDWG

SEQ ID NO: 3270 - protein, 6 aa, Artificial Sequence
  DME variant reference
KPLQRL

SEQ ID NO: 3271 - protein, 6 aa, Artificial Sequence
  DME variant reference
KQYNCA

SEQ ID NO: 3272 - protein, 5 aa, Artificial Sequence
  DME variant reference
KSGEI

SEQ ID NO: 3273 - protein, 4 aa, Artificial Sequence
  DME variant reference
KWYG

SEQ ID NO: 3274 - protein, 5 aa, Artificial Sequence
  DME variant reference
KWYGD

SEQ ID NO: 3275 - protein, 6 aa, Artificial Sequence
  DME variant reference
KWYGDL

SEQ ID NO: 3276 - protein, 7 aa, Artificial Sequence
  DME variant reference
LDFYSIH

SEQ ID NO: 3277 - protein, 8 aa, Artificial Sequence
  DME variant reference
LDFYSIHV

SEQ ID NO: 3278 - protein, 5 aa, Artificial Sequence
  DME variant reference
GSPGI

SEQ ID NO: 3279 - protein, 6 aa, Artificial Sequence
  DME variant reference
GSPGIK

SEQ ID NO: 3280 - protein, 5 aa, Artificial Sequence
  DME variant reference
LEQIG

SEQ ID NO: 3281 - protein, 6 aa, Artificial Sequence
  DME variant reference
LEQIGG

SEQ ID NO: 3282 - protein, 6 aa, Artificial Sequence
  DME variant reference
NCGFET

SEQ ID NO: 3283 - protein, 4 aa, Artificial Sequence
  DME variant reference
NLYL

SEQ ID NO: 3284 - protein, 6 aa, Artificial Sequence
  DME variant reference
PKITLP

SEQ ID NO: 3285 - protein, 5 aa, Artificial Sequence
  DME variant reference
RCELK

SEQ ID NO: 3286 - protein, 6 aa, Artificial Sequence
  DME variant reference
RIDKKV

SEQ ID NO: 3287 - protein, 6 aa, Artificial Sequence
  DME variant reference
RSWLFL

SEQ ID NO: 3288 - protein, 6 aa, Artificial Sequence
  DME variant reference
SEDAQS

SEQ ID NO: 3289 - protein, 4 aa, Artificial Sequence
  DME variant reference
TGWM

SEQ ID NO: 3290 - protein, 4 aa, Artificial Sequence
  DME variant reference
TING

SEQ ID NO: 3291 - protein, 4 aa, Artificial Sequence
  DME variant reference
TLYN

SEQ ID NO: 3292 - protein, 8 aa, Artificial Sequence
  DME variant reference
TLYNRRTR

SEQ ID NO: 3293 - protein, 5 aa, Artificial Sequence
  DME variant reference
VAQIV

SEQ ID NO: 3294 - protein, 7 aa, Artificial Sequence
  DME variant reference
VKDSNTK

SEQ ID NO: 3295 - protein, 4 aa, Artificial Sequence
  DME variant reference
VTYS

SEQ ID NO: 3296 - protein, 10 aa, Artificial Sequence
  DME variant reference
VTYSLGKFGQ

SEQ ID NO: 3297 - protein, 7 aa, Artificial Sequence
  DME variant reference
VYDEAWE

SEQ ID NO: 3298 - protein, 4 aa, Artificial Sequence
  DME variant alteration
AAEQ

SEQ ID NO: 3299 - protein, 5 aa, Artificial Sequence
  DME variant alteration
AAEQA

SEQ ID NO: 3300 - protein, 8 aa, Artificial Sequence
  DME variant alteration
AAKEVEQR

SEQ ID NO: 3301 - protein, 7 aa, Artificial Sequence
  DME variant alteration
AASCGSR

SEQ ID NO: 3302 - protein, 4 aa, Artificial Sequence
  DME variant alteration
ADDM

SEQ ID NO: 3303 - protein, 5 aa, Artificial Sequence
  DME variant alteration
ADDMV

SEQ ID NO: 3304 - protein, 6 aa, Artificial Sequence
  DME variant alteration
ADDMVR

SEQ ID NO: 3305 - protein, 7 aa, Artificial Sequence
  DME variant alteration
ADDMVRN

SEQ ID NO: 3306 - protein, 7 aa, Artificial Sequence
  DME variant alteration
ADKDEFC

SEQ ID NO: 3307 - protein, 4 aa, Artificial Sequence
  DME variant alteration
ADYD

SEQ ID NO: 3308 - protein, 7 aa, Artificial Sequence
  DME variant alteration
AEQAALN

SEQ ID NO: 3309 - protein, 5 aa, Artificial Sequence
  DME variant alteration
AERQY

SEQ ID NO: 3310 - protein, 8 aa, Artificial Sequence
  DME variant alteration
AFEANRFY

SEQ ID NO: 3311 - protein, 4 aa, Artificial Sequence
  DME variant alteration
AFGK

SEQ ID NO: 3312 - protein, 7 aa, Artificial Sequence
  DME variant alteration
AFGKRQG

SEQ ID NO: 3313 - protein, 6 aa, Artificial Sequence
  DME variant alteration
AGYKRQ

SEQ ID NO: 3314 - protein, 7 aa, Artificial Sequence
  DME variant alteration
AKEVEQR

SEQ ID NO: 3315 - protein, 4 aa, Artificial Sequence
  DME variant alteration
AKNL

SEQ ID NO: 3316 - protein, 8 aa, Artificial Sequence
  DME variant alteration
AKPLQRLK

SEQ ID NO: 3317 - protein, 5 aa, Artificial Sequence
  DME variant alteration
ALDFY

SEQ ID NO: 3318 - protein, 4 aa, Artificial Sequence
  DME variant alteration
ALLP

SEQ ID NO: 3319 - protein, 5 aa, Artificial Sequence
  DME variant alteration
ALLPY

SEQ ID NO: 3320 - protein, 4 aa, Artificial Sequence
  DME variant alteration
ALNI

SEQ ID NO: 3321 - protein, 7 aa, Artificial Sequence
  DME variant alteration
ALSDACM

SEQ ID NO: 3322 - protein, 4 aa, Artificial Sequence
  DME variant alteration
ALTD

SEQ ID NO: 3323 - protein, 6 aa, Artificial Sequence
  DME variant alteration
ALTDPE

SEQ ID NO: 3324 - protein, 7 aa, Artificial Sequence
  DME variant alteration
ALTDWLR

SEQ ID NO: 3325 - protein, 6 aa, Artificial Sequence
  DME variant alteration
ANLKDI

SEQ ID NO: 3326 - protein, 4 aa, Artificial Sequence
  DME variant alteration
ANLS

SEQ ID NO: 3327 - protein, 5 aa, Artificial Sequence
  DME variant alteration
ANRFY

SEQ ID NO: 3328 - protein, 6 aa, Artificial Sequence
  DME variant alteration
AQIVIW

SEQ ID NO: 3329 - protein, 4 aa, Artificial Sequence
  DME variant alteration
AQSK

SEQ ID NO: 3330 - protein, 6 aa, Artificial Sequence
  DME variant alteration
ASGPVG

SEQ ID NO: 3331 - protein, 11 aa, Artificial Sequence
  DME variant alteration
ASSDREPWTST

SEQ ID NO: 3332 - protein, 4 aa, Artificial Sequence
  DME variant alteration
ASSK

SEQ ID NO: 3333 - protein, 10 aa, Artificial Sequence
  DME variant alteration
ASSKDLQASN

SEQ ID NO: 3334 - protein, 4 aa, Artificial Sequence
  DME variant alteration
ATLH

SEQ ID NO: 3335 - protein, 4 aa, Artificial Sequence
  DME variant alteration
AVTQ

SEQ ID NO: 3336 - protein, 5 aa, Artificial Sequence
  DME variant alteration
AVTQD

SEQ ID NO: 3337 - protein, 7 aa, Artificial Sequence
  DME variant alteration
AWERIDK

SEQ ID NO: 3338 - protein, 5 aa, Artificial Sequence
  DME variant alteration
AYNNV

SEQ ID NO: 3339 - protein, 5 aa, Artificial Sequence
  DME variant alteration
CNVSE

SEQ ID NO: 3340 - protein, 6 aa, Artificial Sequence
  DME variant alteration
CTMRPG

SEQ ID NO: 3341 - protein, 4 aa, Artificial Sequence
  DME variant alteration
DACM

SEQ ID NO: 3342 - protein, 5 aa, Artificial Sequence
  DME variant alteration
DACMG

SEQ ID NO: 3343 - protein, 7 aa, Artificial Sequence
  DME variant alteration
DACMGAV

SEQ ID NO: 3344 - protein, 5 aa, Artificial Sequence
  DME variant alteration
DAQSK

SEQ ID NO: 3345 - protein, 4 aa, Artificial Sequence
  DME variant alteration
DDMV

SEQ ID NO: 3346 - protein, 7 aa, Artificial Sequence
  DME variant alteration
DDPNLII

SEQ ID NO: 3347 - protein, 4 aa, Artificial Sequence
  DME variant alteration
DEAW

SEQ ID NO: 3348 - protein, 5 aa, Artificial Sequence
  DME variant alteration
DEAWE

SEQ ID NO: 3349 - protein, 8 aa, Artificial Sequence
  DME variant alteration
DEAWERID

SEQ ID NO: 3350 - protein, 5 aa, Artificial Sequence
  DME variant alteration
DEFCR

SEQ ID NO: 3351 - protein, 7 aa, Artificial Sequence
  DME variant alteration
DEFCRCE

SEQ ID NO: 3352 - protein, 4 aa, Artificial Sequence
  DME variant alteration
DELV

SEQ ID NO: 3353 - protein, 5 aa, Artificial Sequence
  DME variant alteration
DFYSI

SEQ ID NO: 3354 - protein, 6 aa, Artificial Sequence
  DME variant alteration
DFYSIH

SEQ ID NO: 3355 - protein, 5 aa, Artificial Sequence
  DME variant alteration
DHSRD

SEQ ID NO: 3356 - protein, 4 aa, Artificial Sequence
  DME variant alteration
DISG

SEQ ID NO: 3357 - protein, 6 aa, Artificial Sequence
  DME variant alteration
DISGFS

SEQ ID NO: 3358 - protein, 4 aa, Artificial Sequence
  DME variant alteration
DISS

SEQ ID NO: 3359 - protein, 4 aa, Artificial Sequence
  DME variant alteration
DKRA

SEQ ID NO: 3360 - protein, 6 aa, Artificial Sequence
  DME variant alteration
DKRAFV

SEQ ID NO: 3361 - protein, 5 aa, Artificial Sequence
  DME variant alteration
DLLLH

SEQ ID NO: 3362 - protein, 6 aa, Artificial Sequence
  DME variant alteration
DLLLHL

SEQ ID NO: 3363 - protein, 4 aa, Artificial Sequence
  DME variant alteration
DLLS

SEQ ID NO: 3364 - protein, 6 aa, Artificial Sequence
  DME variant alteration
DLLSLE

SEQ ID NO: 3365 - protein, 6 aa, Artificial Sequence
  DME variant alteration
DLSVEL

SEQ ID NO: 3366 - protein, 4 aa, Artificial Sequence
  DME variant alteration
DMVC

SEQ ID NO: 3367 - protein, 4 aa, Artificial Sequence
  DME variant alteration
DNQV

SEQ ID NO: 3368 - protein, 5 aa, Artificial Sequence
  DME variant alteration
DNQVG

SEQ ID NO: 3369 - protein, 4 aa, Artificial Sequence
  DME variant alteration
DRKK

SEQ ID NO: 3370 - protein, 6 aa, Artificial Sequence
  DME variant alteration
DWGKVY

SEQ ID NO: 3371 - protein, 7 aa, Artificial Sequence
  DME variant alteration
DYDRVLE

SEQ ID NO: 3372 - protein, 6 aa, Artificial Sequence
  DME variant alteration
EAAVQA

SEQ ID NO: 3373 - protein, 8 aa, Artificial Sequence
  DME variant alteration
EADKDEFC

SEQ ID NO: 3374 - protein, 7 aa, Artificial Sequence
  DME variant alteration
EAENSIL

SEQ ID NO: 3375 - protein, 4 aa, Artificial Sequence
  DME variant alteration
EAFE

SEQ ID NO: 3376 - protein, 5 aa, Artificial Sequence
  DME variant alteration
EAGCS

SEQ ID NO: 3377 - protein, 5 aa, Artificial Sequence
  DME variant alteration
EANDE

SEQ ID NO: 3378 - protein, 4 aa, Artificial Sequence
  DME variant alteration
EAWE

SEQ ID NO: 3379 - protein, 5 aa, Artificial Sequence
  DME variant alteration
EAWER

SEQ ID NO: 3380 - protein, 6 aa, Artificial Sequence
  DME variant alteration
EEERRS

SEQ ID NO: 3381 - protein, 4 aa, Artificial Sequence
  DME variant alteration
EERR

SEQ ID NO: 3382 - protein, 5 aa, Artificial Sequence
  DME variant alteration
EERRS

SEQ ID NO: 3383 - protein, 5 aa, Artificial Sequence
  DME variant alteration
EFCRC

SEQ ID NO: 3384 - protein, 4 aa, Artificial Sequence
  DME variant alteration
EGLS

SEQ ID NO: 3385 - protein, 4 aa, Artificial Sequence
  DME variant alteration
EGQI

SEQ ID NO: 3386 - protein, 5 aa, Artificial Sequence
  DME variant alteration
EGQIT

SEQ ID NO: 3387 - protein, 6 aa, Artificial Sequence
  DME variant alteration
EGQITY

SEQ ID NO: 3388 - protein, 7 aa, Artificial Sequence
  DME variant alteration
EGQITYY

SEQ ID NO: 3389 - protein, 8 aa, Artificial Sequence
  DME variant alteration
EGQITYYN

SEQ ID NO: 3390 - protein, 6 aa, Artificial Sequence
  DME variant alteration
EHERLI

SEQ ID NO: 3391 - protein, 5 aa, Artificial Sequence
  DME variant alteration
EKKED

SEQ ID NO: 3392 - protein, 5 aa, Artificial Sequence
  DME variant alteration
EKKHG

SEQ ID NO: 3393 - protein, 7 aa, Artificial Sequence
  DME variant alteration
ERIDKKV

SEQ ID NO: 3394 - protein, 4 aa, Artificial Sequence
  DME variant alteration
ERLI

SEQ ID NO: 3395 - protein, 7 aa, Artificial Sequence
  DME variant alteration
ERREVLD

SEQ ID NO: 3396 - protein, 6 aa, Artificial Sequence
  DME variant alteration
ESNHPV

SEQ ID NO: 3397 - protein, 6 aa, Artificial Sequence
  DME variant alteration
ESVNND

SEQ ID NO: 3398 - protein, 4 aa, Artificial Sequence
  DME variant alteration
ETHA

SEQ ID NO: 3399 - protein, 5 aa, Artificial Sequence
  DME variant alteration
ETHAA

SEQ ID NO: 3400 - protein, 6 aa, Artificial Sequence
  DME variant alteration
ETHAAE

SEQ ID NO: 3401 - protein, 6 aa, Artificial Sequence
  DME variant alteration
ETHADE

SEQ ID NO: 3402 - protein, 5 aa, Artificial Sequence
  DME variant alteration
ETWQS

SEQ ID NO: 3403 - protein, 7 aa, Artificial Sequence
  DME variant alteration
ETWQSFY

SEQ ID NO: 3404 - protein, 4 aa, Artificial Sequence
  DME variant alteration
EVLD

SEQ ID NO: 3405 - protein, 5 aa, Artificial Sequence
  DME variant alteration
EVLDS

SEQ ID NO: 3406 - protein, 7 aa, Artificial Sequence
  DME variant alteration
EVLDSSN

SEQ ID NO: 3407 - protein, 5 aa, Artificial Sequence
  DME variant alteration
EVNFN

SEQ ID NO: 3408 - protein, 7 aa, Artificial Sequence
  DME variant alteration
FAIEAEN

SEQ ID NO: 3409 - protein, 5 aa, Artificial Sequence
  DME variant alteration
FERRE

SEQ ID NO: 3410 - protein, 9 aa, Artificial Sequence
  DME variant alteration
FETHAAEQA

SEQ ID NO: 3411 - protein, 6 aa, Artificial Sequence
  DME variant alteration
FGKRQG

SEQ ID NO: 3412 - protein, 7 aa, Artificial Sequence
  DME variant alteration
FGQRALD

SEQ ID NO: 3413 - protein, 4 aa, Artificial Sequence
  DME variant alteration
FIWN

SEQ ID NO: 3414 - protein, 7 aa, Artificial Sequence
  DME variant alteration
FIWNDLL

SEQ ID NO: 3415 - protein, 7 aa, Artificial Sequence
  DME variant alteration
FPSFPLV

SEQ ID NO: 3416 - protein, 6 aa, Artificial Sequence
  DME variant alteration
FSKQYN

SEQ ID NO: 3417 - protein, 8 aa, Artificial Sequence
  DME variant alteration
FSKQYNCA

SEQ ID NO: 3418 - protein, 4 aa, Artificial Sequence
  DME variant alteration
FSSK

SEQ ID NO: 3419 - protein, 7 aa, Artificial Sequence
  DME variant alteration
FSSKDLQ

SEQ ID NO: 3420 - protein, 11 aa, Artificial Sequence
  DME variant alteration
FSSKDLQASNK

SEQ ID NO: 3421 - protein, 5 aa, Artificial Sequence
  DME variant alteration
FVCLN

SEQ ID NO: 3422 - protein, 5 aa, Artificial Sequence
  DME variant alteration
FYRKK

SEQ ID NO: 3423 - protein, 6 aa, Artificial Sequence
  DME variant alteration
GAVASF

SEQ ID NO: 3424 - protein, 6 aa, Artificial Sequence
  DME variant alteration
GCPLSR

SEQ ID NO: 3425 - protein, 8 aa, Artificial Sequence
  DME variant alteration
GCPLSRFK

SEQ ID NO: 3426 - protein, 6 aa, Artificial Sequence
  DME variant alteration
GDLLLH

SEQ ID NO: 3427 - protein, 4 aa, Artificial Sequence
  DME variant alteration
GDLR

SEQ ID NO: 3428 - protein, 6 aa, Artificial Sequence
  DME variant alteration
GDLRGK

SEQ ID NO: 3429 - protein, 7 aa, Artificial Sequence
  DME variant alteration
GDLRGKP

SEQ ID NO: 3430 - protein, 7 aa, Artificial Sequence
  DME variant alteration
GFSKQYN

SEQ ID NO: 3431 - protein, 6 aa, Artificial Sequence
  DME variant alteration
GGNSCA

SEQ ID NO: 3432 - protein, 8 aa, Artificial Sequence
  DME variant alteration
GGNSCASG

SEQ ID NO: 3433 - protein, 7 aa, Artificial Sequence
  DME variant alteration
GKELKVE

SEQ ID NO: 3434 - protein, 5 aa, Artificial Sequence
  DME variant alteration
GKFGQ

SEQ ID NO: 3435 - protein, 6 aa, Artificial Sequence
  DME variant alteration
GKFGQR

SEQ ID NO: 3436 - protein, 5 aa, Artificial Sequence
  DME variant alteration
GKPHT

SEQ ID NO: 3437 - protein, 6 aa, Artificial Sequence
  DME variant alteration
GKPHTN

SEQ ID NO: 3438 - protein, 7 aa, Artificial Sequence
  DME variant alteration
GKPHTNY

SEQ ID NO: 3439 - protein, 8 aa, Artificial Sequence
  DME variant alteration
GKPHTNYF

SEQ ID NO: 3440 - protein, 4 aa, Artificial Sequence
  DME variant alteration
GKRQ

SEQ ID NO: 3441 - protein, 9 aa, Artificial Sequence
  DME variant alteration
GKVYDEAWE

SEQ ID NO: 3442 - protein, 6 aa, Artificial Sequence
  DME variant alteration
GLAFPK

SEQ ID NO: 3443 - protein, 7 aa, Artificial Sequence
  DME variant alteration
GLKEADK

SEQ ID NO: 3444 - protein, 5 aa, Artificial Sequence
  DME variant alteration
GLPSK

SEQ ID NO: 3445 - protein, 4 aa, Artificial Sequence
  DME variant alteration
GNTD

SEQ ID NO: 3446 - protein, 5 aa, Artificial Sequence
  DME variant alteration
GNTDK

SEQ ID NO: 3447 - protein, 7 aa, Artificial Sequence
  DME variant alteration
GNTDKRA

SEQ ID NO: 3448 - protein, 8 aa, Artificial Sequence
  DME variant alteration
GQRALDFY

SEQ ID NO: 3449 - protein, 5 aa, Artificial Sequence
  DME variant alteration
GREFI

SEQ ID NO: 3450 - protein, 6 aa, Artificial Sequence
  DME variant alteration
GREFIW

SEQ ID NO: 3451 - protein, 4 aa, Artificial Sequence
  DME variant alteration
GRII

SEQ ID NO: 3452 - protein, 6 aa, Artificial Sequence
  DME variant alteration
GRSGEA

SEQ ID NO: 3453 - protein, 7 aa, Artificial Sequence
  DME variant alteration
GRSGEAL

SEQ ID NO: 3454 - protein, 7 aa, Artificial Sequence
  DME variant alteration
GSLKLAN

SEQ ID NO: 3455 - protein, 8 aa, Artificial Sequence
  DME variant alteration
GVKKLNLY

SEQ ID NO: 3456 - protein, 5 aa, Artificial Sequence
  DME variant alteration
GYKRQ

SEQ ID NO: 3457 - protein, 4 aa, Artificial Sequence
  DME variant alteration
GYSR

SEQ ID NO: 3458 - protein, 5 aa, Artificial Sequence
  DME variant alteration
GYSRK

SEQ ID NO: 3459 - protein, 8 aa, Artificial Sequence
  DME variant alteration
GYSRKYAS

SEQ ID NO: 3460 - protein, 7 aa, Artificial Sequence
  DME variant alteration
HERLILL

SEQ ID NO: 3461 - protein, 5 aa, Artificial Sequence
  DME variant alteration
HIKLE

SEQ ID NO: 3462 - protein, 4 aa, Artificial Sequence
  DME variant alteration
HRPV

SEQ ID NO: 3463 - protein, 4 aa, Artificial Sequence
  DME variant alteration
HTKE

SEQ ID NO: 3464 - protein, 5 aa, Artificial Sequence
  DME variant alteration
HTKEG

SEQ ID NO: 3465 - protein, 7 aa, Artificial Sequence
  DME variant alteration
HTKEGIE

SEQ ID NO: 3466 - protein, 5 aa, Artificial Sequence
  DME variant alteration
IARGE

SEQ ID NO: 3467 - protein, 6 aa, Artificial Sequence
  DME variant alteration
IDRGEN

SEQ ID NO: 3468 - protein, 6 aa, Artificial Sequence
  DME variant alteration
IEAENS

SEQ ID NO: 3469 - protein, 7 aa, Artificial Sequence
  DME variant alteration
IEAENSI

SEQ ID NO: 3470 - protein, 9 aa, Artificial Sequence
  DME variant alteration
IEAENSILD

SEQ ID NO: 3471 - protein, 7 aa, Artificial Sequence
  DME variant alteration
IEKTLYN

SEQ ID NO: 3472 - protein, 6 aa, Artificial Sequence
  DME variant alteration
IFANLS

SEQ ID NO: 3473 - protein, 7 aa, Artificial Sequence
  DME variant alteration
IFANLSR

SEQ ID NO: 3474 - protein, 6 aa, Artificial Sequence
  DME variant alteration
IFENLS

SEQ ID NO: 3475 - protein, 6 aa, Artificial Sequence
  DME variant alteration
IKRINK

SEQ ID NO: 3476 - protein, 6 aa, Artificial Sequence
  DME variant alteration
ILEHQK

SEQ ID NO: 3477 - protein, 7 aa, Artificial Sequence
  DME variant alteration
INGKELK

SEQ ID NO: 3478 - protein, 5 aa, Artificial Sequence
  DME variant alteration
INYFK

SEQ ID NO: 3479 - protein, 4 aa, Artificial Sequence
  DME variant alteration
IPAV

SEQ ID NO: 3480 - protein, 5 aa, Artificial Sequence
  DME variant alteration
IQAAK

SEQ ID NO: 3481 - protein, 6 aa, Artificial Sequence
  DME variant alteration
IQAAKE

SEQ ID NO: 3482 - protein, 7 aa, Artificial Sequence
  DME variant alteration
ISSKDLQ

SEQ ID NO: 3483 - protein, 4 aa, Artificial Sequence
  DME variant alteration
ITYY

SEQ ID NO: 3484 - protein, 5 aa, Artificial Sequence
  DME variant alteration
ITYYN

SEQ ID NO: 3485 - protein, 4 aa, Artificial Sequence
  DME variant alteration
IVIW

SEQ ID NO: 3486 - protein, 4 aa, Artificial Sequence
  DME variant alteration
IWND

SEQ ID NO: 3487 - protein, 6 aa, Artificial Sequence
  DME variant alteration
IWNDLL

SEQ ID NO: 3488 - protein, 5 aa, Artificial Sequence
  DME variant alteration
IWQKD

SEQ ID NO: 3489 - protein, 5 aa, Artificial Sequence
  DME variant alteration
KDSLG

SEQ ID NO: 3490 - protein, 4 aa, Artificial Sequence
  DME variant alteration
KEAD

SEQ ID NO: 3491 - protein, 7 aa, Artificial Sequence
  DME variant alteration
KEADKDE

SEQ ID NO: 3492 - protein, 4 aa, Artificial Sequence
  DME variant alteration
KEDG

SEQ ID NO: 3493 - protein, 6 aa, Artificial Sequence
  DME variant alteration
KEVEQR

SEQ ID NO: 3494 - protein, 5 aa, Artificial Sequence
  DME variant alteration
KGKPH

SEQ ID NO: 3495 - protein, 7 aa, Artificial Sequence
  DME variant alteration
KGKPHTN

SEQ ID NO: 3496 - protein, 8 aa, Artificial Sequence
  DME variant alteration
KGKPHTNY

SEQ ID NO: 3497 - protein, 5 aa, Artificial Sequence
  DME variant alteration
KHGED

SEQ ID NO: 3498 - protein, 4 aa, Artificial Sequence
  DME variant alteration
KKGK

SEQ ID NO: 3499 - protein, 5 aa, Artificial Sequence
  DME variant alteration
KKGKK

SEQ ID NO: 3500 - protein, 6 aa, Artificial Sequence
  DME variant alteration
KKHGED

SEQ ID NO: 3501 - protein, 4 aa, Artificial Sequence
  DME variant alteration
KKIK

SEQ ID NO: 3502 - protein, 4 aa, Artificial Sequence
  DME variant alteration
KKLI

SEQ ID NO: 3503 - protein, 6 aa, Artificial Sequence
  DME variant alteration
KKLINE

SEQ ID NO: 3504 - protein, 7 aa, Artificial Sequence
  DME variant alteration
KKLKEVW

SEQ ID NO: 3505 - protein, 4 aa, Artificial Sequence
  DME variant alteration
KKNE

SEQ ID NO: 3506 - protein, 4 aa, Artificial Sequence
  DME variant alteration
KKVE

SEQ ID NO: 3507 - protein, 7 aa, Artificial Sequence
  DME variant alteration
KKVEGLS

SEQ ID NO: 3508 - protein, 6 aa, Artificial Sequence
  DME variant alteration
KKYQTN

SEQ ID NO: 3509 - protein, 9 aa, Artificial Sequence
  DME variant alteration
KLKIGRDEA

SEQ ID NO: 3510 - protein, 4 aa, Artificial Sequence
  DME variant alteration
KLKK

SEQ ID NO: 3511 - protein, 4 aa, Artificial Sequence
  DME variant alteration
KLNL

SEQ ID NO: 3512 - protein, 6 aa, Artificial Sequence
  DME variant alteration
KLNLYL

SEQ ID NO: 3513 - protein, 4 aa, Artificial Sequence
  DME variant alteration
KLQK

SEQ ID NO: 3514 - protein, 5 aa, Artificial Sequence
  DME variant alteration
KLQKW

SEQ ID NO: 3515 - protein, 4 aa, Artificial Sequence
  DME variant alteration
KLRF

SEQ ID NO: 3516 - protein, 5 aa, Artificial Sequence
  DME variant alteration
KLRFK

SEQ ID NO: 3517 - protein, 5 aa, Artificial Sequence
  DME variant alteration
KNEKR

SEQ ID NO: 3518 - protein, 4 aa, Artificial Sequence
  DME variant alteration
KPAV

SEQ ID NO: 3519 - protein, 4 aa, Artificial Sequence
  DME variant alteration
KPEA

SEQ ID NO: 3520 - protein, 4 aa, Artificial Sequence
  DME variant alteration
KPHT

SEQ ID NO: 3521 - protein, 6 aa, Artificial Sequence
  DME variant alteration
KPHTNY

SEQ ID NO: 3522 - protein, 7 aa, Artificial Sequence
  DME variant alteration
KPHTNYF

SEQ ID NO: 3523 - protein, 4 aa, Artificial Sequence
  DME variant alteration
KPMN

SEQ ID NO: 3524 - protein, 7 aa, Artificial Sequence
  DME variant alteration
KPMNLIG

SEQ ID NO: 3525 - protein, 4 aa, Artificial Sequence
  DME variant alteration
KQYN

SEQ ID NO: 3526 - protein, 5 aa, Artificial Sequence
  DME variant alteration
KQYNC

SEQ ID NO: 3527 - protein, 4 aa, Artificial Sequence
  DME variant alteration
KRLA

SEQ ID NO: 3528 - protein, 8 aa, Artificial Sequence
  DME variant alteration
KRLANLKD

SEQ ID NO: 3529 - protein, 5 aa, Artificial Sequence
  DME variant alteration
KRQGR

SEQ ID NO: 3530 - protein, 7 aa, Artificial Sequence
  DME variant alteration
KTLAQYT

SEQ ID NO: 3531 - protein, 7 aa, Artificial Sequence
  DME variant alteration
KTYLSKT

SEQ ID NO: 3532 - protein, 6 aa, Artificial Sequence
  DME variant alteration
KVEGQI

SEQ ID NO: 3533 - protein, 8 aa, Artificial Sequence
  DME variant alteration
KYQDIILE

SEQ ID NO: 3534 - protein, 6 aa, Artificial Sequence
  DME variant alteration
LAFGKR

SEQ ID NO: 3535 - protein, 7 aa, Artificial Sequence
  DME variant alteration
LAFPKIT

SEQ ID NO: 3536 - protein, 5 aa, Artificial Sequence
  DME variant alteration
LANGR

SEQ ID NO: 3537 - protein, 6 aa, Artificial Sequence
  DME variant alteration
LANGRV

SEQ ID NO: 3538 - protein, 8 aa, Artificial Sequence
  DME variant alteration
LANGRVIE

SEQ ID NO: 3539 - protein, 6 aa, Artificial Sequence
  DME variant alteration
LANLKD

SEQ ID NO: 3540 - protein, 4 aa, Artificial Sequence
  DME variant alteration
LAQY

SEQ ID NO: 3541 - protein, 4 aa, Artificial Sequence
  DME variant alteration
LAYE

SEQ ID NO: 3542 - protein, 9 aa, Artificial Sequence
  DME variant alteration
LDFYSIHVT

SEQ ID NO: 3543 - protein, 4 aa, Artificial Sequence
  DME variant alteration
LEQI

SEQ ID NO: 3544 - protein, 5 aa, Artificial Sequence
  DME variant alteration
LEQIG

SEQ ID NO: 3545 - protein, 7 aa, Artificial Sequence
  DME variant alteration
LETGSLK

SEQ ID NO: 3546 - protein, 4 aa, Artificial Sequence
  DME variant alteration
LFLR

SEQ ID NO: 3547 - protein, 7 aa, Artificial Sequence
  DME variant alteration
LGKFGQR

SEQ ID NO: 3548 - protein, 8 aa, Artificial Sequence
  DME variant alteration
LGKFGQRA

SEQ ID NO: 3549 - protein, 5 aa, Artificial Sequence
  DME variant alteration
LGNPT

SEQ ID NO: 3550 - protein, 7 aa, Artificial Sequence
  DME variant alteration
LGNPTHI

SEQ ID NO: 3551 - protein, 4 aa, Artificial Sequence
  DME variant alteration
LHLE

SEQ ID NO: 3552 - protein, 5 aa, Artificial Sequence
  DME variant alteration
LHLEK

SEQ ID NO: 3553 - protein, 7 aa, Artificial Sequence
  DME variant alteration
LHLEKKH

SEQ ID NO: 3554 - protein, 7 aa, Artificial Sequence
  DME variant alteration
LINEKKE

SEQ ID NO: 3555 - protein, 5 aa, Artificial Sequence
  DME variant alteration
LKEAD

SEQ ID NO: 3556 - protein, 7 aa, Artificial Sequence
  DME variant alteration
LKEADKD

SEQ ID NO: 3557 - protein, 5 aa, Artificial Sequence
  DME variant alteration
LKGFP

SEQ ID NO: 3558 - protein, 7 aa, Artificial Sequence
  DME variant alteration
LKVEGQI

SEQ ID NO: 3559 - protein, 4 aa, Artificial Sequence
  DME variant alteration
LLPY

SEQ ID NO: 3560 - protein, 5 aa, Artificial Sequence
  DME variant alteration
LLSPH

SEQ ID NO: 3561 - protein, 6 aa, Artificial Sequence
  DME variant alteration
LLSPHK

SEQ ID NO: 3562 - protein, 4 aa, Artificial Sequence
  DME variant alteration
LLYY

SEQ ID NO: 3563 - protein, 4 aa, Artificial Sequence
  DME variant alteration
LNLY

SEQ ID NO: 3564 - protein, 5 aa, Artificial Sequence
  DME variant alteration
LNLYL

SEQ ID NO: 3565 - protein, 6 aa, Artificial Sequence
  DME variant alteration
LNLYLI

SEQ ID NO: 3566 - protein, 4 aa, Artificial Sequence
  DME variant alteration
LPLA

SEQ ID NO: 3567 - protein, 4 aa, Artificial Sequence
  DME variant alteration
LPPQ

SEQ ID NO: 3568 - protein, 6 aa, Artificial Sequence
  DME variant alteration
LPSKTY

SEQ ID NO: 3569 - protein, 7 aa, Artificial Sequence
  DME variant alteration
LPYLSSE

SEQ ID NO: 3570 - protein, 6 aa, Artificial Sequence
  DME variant alteration
LRSPCL

SEQ ID NO: 3571 - protein, 7 aa, Artificial Sequence
  DME variant alteration
LSDACMG

SEQ ID NO: 3572 - protein, 4 aa, Artificial Sequence
  DME variant alteration
LSEE

SEQ ID NO: 3573 - protein, 7 aa, Artificial Sequence
  DME variant alteration
LSEESVN

SEQ ID NO: 3574 - protein, 6 aa, Artificial Sequence
  DME variant alteration
LSKTLA

SEQ ID NO: 3575 - protein, 9 aa, Artificial Sequence
  DME variant alteration
LSKTLAQYT

SEQ ID NO: 3576 - protein, 7 aa, Artificial Sequence
  DME variant alteration
LSLETGS

SEQ ID NO: 3577 - protein, 6 aa, Artificial Sequence
  DME variant alteration
LSRFKD

SEQ ID NO: 3578 - protein, 7 aa, Artificial Sequence
  DME variant alteration
LSRFKDS

SEQ ID NO: 3579 - protein, 7 aa, Artificial Sequence
  DME variant alteration
LSVELDR

SEQ ID NO: 3580 - protein, 6 aa, Artificial Sequence
  DME variant alteration
LTAKLA

SEQ ID NO: 3581 - protein, 4 aa, Artificial Sequence
  DME variant alteration
LTKY

SEQ ID NO: 3582 - protein, 7 aa, Artificial Sequence
  DME variant alteration
LWPRGST

SEQ ID NO: 3583 - protein, 6 aa, Artificial Sequence
  DME variant alteration
LWQKLK

SEQ ID NO: 3584 - protein, 6 aa, Artificial Sequence
  DME variant alteration
MAERQY

SEQ ID NO: 3585 - protein, 4 aa, Artificial Sequence
  DME variant alteration
MVRN

SEQ ID NO: 3586 - protein, 7 aa, Artificial Sequence
  DME variant alteration
MVRNTAR

SEQ ID NO: 3587 - protein, 4 aa, Artificial Sequence
  DME variant alteration
NCAF

SEQ ID NO: 3588 - protein, 6 aa, Artificial Sequence
  DME variant alteration
NCAFIW

SEQ ID NO: 3589 - protein, 8 aa, Artificial Sequence
  DME variant alteration
NCAFIWQK

SEQ ID NO: 3590 - protein, 7 aa, Artificial Sequence
  DME variant alteration
NDISSWT

SEQ ID NO: 3591 - protein, 6 aa, Artificial Sequence
  DME variant alteration
NEKRLA

SEQ ID NO: 3592 - protein, 7 aa, Artificial Sequence
  DME variant alteration
NGLAFPK

SEQ ID NO: 3593 - protein, 4 aa, Artificial Sequence
  DME variant alteration
NIAR

SEQ ID NO: 3594 - protein, 4 aa, Artificial Sequence
  DME variant alteration
NLSR

SEQ ID NO: 3595 - protein, 7 aa, Artificial Sequence
  DME variant alteration
NPTHILR

SEQ ID NO: 3596 - protein, 7 aa, Artificial Sequence
  DME variant alteration
NRFYTVI

SEQ ID NO: 3597 - protein, 6 aa, Artificial Sequence
  DME variant alteration
NRYKRQ

SEQ ID NO: 3598 - protein, 5 aa, Artificial Sequence
  DME variant alteration
NSILD

SEQ ID NO: 3599 - protein, 4 aa, Artificial Sequence
  DME variant alteration
NSSL

SEQ ID NO: 3600 - protein, 4 aa, Artificial Sequence
  DME variant alteration
NSSL

SEQ ID NO: 3601 - protein, 6 aa, Artificial Sequence
  DME variant alteration
NSSLSA

SEQ ID NO: 3602 - protein, 8 aa, Artificial Sequence
  DME variant alteration
NSSLSASF

SEQ ID NO: 3603 - protein, 8 aa, Artificial Sequence
  DME variant alteration
NSSLSASF

SEQ ID NO: 3604 - protein, 4 aa, Artificial Sequence
  DME variant alteration
NTDK

SEQ ID NO: 3605 - protein, 7 aa, Artificial Sequence
  DME variant alteration
NVKKLIN

SEQ ID NO: 3606 - protein, 7 aa, Artificial Sequence
  DME variant alteration
NVSEHER

SEQ ID NO: 3607 - protein, 5 aa, Artificial Sequence
  DME variant alteration
NVVAQ

SEQ ID NO: 3608 - protein, 6 aa, Artificial Sequence
  DME variant alteration
NVVAQI

SEQ ID NO: 3609 - protein, 4 aa, Artificial Sequence
  DME variant alteration
NYFK

SEQ ID NO: 3610 - protein, 4 aa, Artificial Sequence
  DME variant alteration
PALF

SEQ ID NO: 3611 - protein, 6 aa, Artificial Sequence
  DME variant alteration
PAVIAL

SEQ ID NO: 3612 - protein, 7 aa, Artificial Sequence
  DME variant alteration
PAVIALT

SEQ ID NO: 3613 - protein, 8 aa, Artificial Sequence
  DME variant alteration
PCTTGEPD

SEQ ID NO: 3614 - protein, 5 aa, Artificial Sequence
  DME variant alteration
PEAFE

SEQ ID NO: 3615 - protein, 7 aa, Artificial Sequence
  DME variant alteration
PEAFEAN

SEQ ID NO: 3616 - protein, 6 aa, Artificial Sequence
  DME variant alteration
PEANDE

SEQ ID NO: 3617 - protein, 4 aa, Artificial Sequence
  DME variant alteration
PHTK

SEQ ID NO: 3618 - protein, 5 aa, Artificial Sequence
  DME variant alteration
PHTKE

SEQ ID NO: 3619 - protein, 4 aa, Artificial Sequence
  DME variant alteration
PMNL

SEQ ID NO: 3620 - protein, 5 aa, Artificial Sequence
  DME variant alteration
PMNLI

SEQ ID NO: 3621 - protein, 4 aa, Artificial Sequence
  DME variant alteration
PPLL

SEQ ID NO: 3622 - protein, 4 aa, Artificial Sequence
  DME variant alteration
PRLY

SEQ ID NO: 3623 - protein, 5 aa, Artificial Sequence
  DME variant alteration
PSKTY

SEQ ID NO: 3624 - protein, 4 aa, Artificial Sequence
  DME variant alteration
PSTA

SEQ ID NO: 3625 - protein, 4 aa, Artificial Sequence
  DME variant alteration
PTHI

SEQ ID NO: 3626 - protein, 5 aa, Artificial Sequence
  DME variant alteration
PTHIL

SEQ ID NO: 3627 - protein, 6 aa, Artificial Sequence
  DME variant alteration
PTHILR

SEQ ID NO: 3628 - protein, 7 aa, Artificial Sequence
  DME variant alteration
PTHILRI

SEQ ID NO: 3629 - protein, 4 aa, Artificial Sequence
  DME variant alteration
PTRD

SEQ ID NO: 3630 - protein, 6 aa, Artificial Sequence
  DME variant alteration
PVKPLE

SEQ ID NO: 3631 - protein, 5 aa, Artificial Sequence
  DME variant alteration
QAALN

SEQ ID NO: 3632 - protein, 6 aa, Artificial Sequence
  DME variant alteration
QDAMLI

SEQ ID NO: 3633 - protein, 7 aa, Artificial Sequence
  DME variant alteration
QDEPALF

SEQ ID NO: 3634 - protein, 7 aa, Artificial Sequence
  DME variant alteration
QGKRTFM

SEQ ID NO: 3635 - protein, 4 aa, Artificial Sequence
  DME variant alteration
QGRE

SEQ ID NO: 3636 - protein, 6 aa, Artificial Sequence
  DME variant alteration
QGREFI

SEQ ID NO: 3637 - protein, 8 aa, Artificial Sequence
  DME variant alteration
QGREFIWN

SEQ ID NO: 3638 - protein, 5 aa, Artificial Sequence
  DME variant alteration
QIGGN

SEQ ID NO: 3639 - protein, 6 aa, Artificial Sequence
  DME variant alteration
QIGGNS

SEQ ID NO: 3640 - protein, 6 aa, Artificial Sequence
  DME variant alteration
QITYYN

SEQ ID NO: 3641 - protein, 6 aa, Artificial Sequence
  DME variant alteration
QKDGVK

SEQ ID NO: 3642 - protein, 5 aa, Artificial Sequence
  DME variant alteration
QKVIK

SEQ ID NO: 3643 - protein, 5 aa, Artificial Sequence
  DME variant alteration
QNVVK

SEQ ID NO: 3644 - protein, 6 aa, Artificial Sequence
  DME variant alteration
QNVVKD

SEQ ID NO: 3645 - protein, 5 aa, Artificial Sequence
  DME variant alteration
QRALD

SEQ ID NO: 3646 - protein, 7 aa, Artificial Sequence
  DME variant alteration
QRALDFY

SEQ ID NO: 3647 - protein, 8 aa, Artificial Sequence
  DME variant alteration
QRALDFYS

SEQ ID NO: 3648 - protein, 4 aa, Artificial Sequence
  DME variant alteration
QRLK

SEQ ID NO: 3649 - protein, 4 aa, Artificial Sequence
  DME variant alteration
QRTI

SEQ ID NO: 3650 - protein, 6 aa, Artificial Sequence
  DME variant alteration
QRTIQA

SEQ ID NO: 3651 - protein, 7 aa, Artificial Sequence
  DME variant alteration
QSFYRKK

SEQ ID NO: 3652 - protein, 4 aa, Artificial Sequence
  DME variant alteration
QTNK

SEQ ID NO: 3653 - protein, 5 aa, Artificial Sequence
  DME variant alteration
QTNKT

SEQ ID NO: 3654 - protein, 7 aa, Artificial Sequence
  DME variant alteration
QTNKTTG

SEQ ID NO: 3655 - protein, 6 aa, Artificial Sequence
  DME variant alteration
QYTSKT

SEQ ID NO: 3656 - protein, 5 aa, Artificial Sequence
  DME variant alteration
RAKAS

SEQ ID NO: 3657 - protein, 5 aa, Artificial Sequence
  DME variant alteration
RASLA

SEQ ID NO: 3658 - protein, 4 aa, Artificial Sequence
  DME variant alteration
RCNV

SEQ ID NO: 3659 - protein, 5 aa, Artificial Sequence
  DME variant alteration
RCNVS

SEQ ID NO: 3660 - protein, 6 aa, Artificial Sequence
  DME variant alteration
RCNVSE

SEQ ID NO: 3661 - protein, 8 aa, Artificial Sequence
  DME variant alteration
RCNVSEHE

SEQ ID NO: 3662 - protein, 5 aa, Artificial Sequence
  DME variant alteration
REFIW

SEQ ID NO: 3663 - protein, 9 aa, Artificial Sequence
  DME variant alteration
REFIWNDLL

SEQ ID NO: 3664 - protein, 5 aa, Artificial Sequence
  DME variant alteration
RESNH

SEQ ID NO: 3665 - protein, 4 aa, Artificial Sequence
  DME variant alteration
RFYT

SEQ ID NO: 3666 - protein, 5 aa, Artificial Sequence
  DME variant alteration
RFYTV

SEQ ID NO: 3667 - protein, 9 aa, Artificial Sequence
  DME variant alteration
RFYTVINKK

SEQ ID NO: 3668 - protein, 5 aa, Artificial Sequence
  DME variant alteration
RGRPI

SEQ ID NO: 3669 - protein, 4 aa, Artificial Sequence
  DME variant alteration
RKYA

SEQ ID NO: 3670 - protein, 5 aa, Artificial Sequence
  DME variant alteration
RNRSA

SEQ ID NO: 3671 - protein, 6 aa, Artificial Sequence
  DME variant alteration
RNRSAA

SEQ ID NO: 3672 - protein, 6 aa, Artificial Sequence
  DME variant alteration
RNTARD

SEQ ID NO: 3673 - protein, 9 aa, Artificial Sequence
  DME variant alteration
RNTARDLLY

SEQ ID NO: 3674 - protein, 10 aa, Artificial Sequence
  DME variant alteration
RPGRESTRRW

SEQ ID NO: 3675 - protein, 4 aa, Artificial Sequence
  DME variant alteration
RPSR

SEQ ID NO: 3676 - protein, 7 aa, Artificial Sequence
  DME variant alteration
RQANEVD

SEQ ID NO: 3677 - protein, 4 aa, Artificial Sequence
  DME variant alteration
RQGK

SEQ ID NO: 3678 - protein, 5 aa, Artificial Sequence
  DME variant alteration
RQGRE

SEQ ID NO: 3679 - protein, 8 aa, Artificial Sequence
  DME variant alteration
RQNVVKDL

SEQ ID NO: 3680 - protein, 4 aa, Artificial Sequence
  DME variant alteration
RQYT

SEQ ID NO: 3681 - protein, 4 aa, Artificial Sequence
  DME variant alteration
RRTR

SEQ ID NO: 3682 - protein, 5 aa, Artificial Sequence
  DME variant alteration
RRTRQ

SEQ ID NO: 3683 - protein, 6 aa, Artificial Sequence
  DME variant alteration
RRTRQD

SEQ ID NO: 3684 - protein, 7 aa, Artificial Sequence
  DME variant alteration
RRTRQDE

SEQ ID NO: 3685 - protein, 5 aa, Artificial Sequence
  DME variant alteration
RSGEA

SEQ ID NO: 3686 - protein, 6 aa, Artificial Sequence
  DME variant alteration
RSQEYK

SEQ ID NO: 3687 - protein, 5 aa, Artificial Sequence
  DME variant alteration
RSTAR

SEQ ID NO: 3688 - protein, 8 aa, Artificial Sequence
  DME variant alteration
RSTARTGA

SEQ ID NO: 3689 - protein, 6 aa, Artificial Sequence
  DME variant alteration
RSWLFL

SEQ ID NO: 3690 - protein, 7 aa, Artificial Sequence
  DME variant alteration
RTATQRR

SEQ ID NO: 3691 - protein, 4 aa, Artificial Sequence
  DME variant alteration
RTFM

SEQ ID NO: 3692 - protein, 6 aa, Artificial Sequence
  DME variant alteration
RTFMAE

SEQ ID NO: 3693 - protein, 7 aa, Artificial Sequence
  DME variant alteration
RTIQAAK

SEQ ID NO: 3694 - protein, 7 aa, Artificial Sequence
  DME variant alteration
RTSTAST

SEQ ID NO: 3695 - protein, 5 aa, Artificial Sequence
  DME variant alteration
SEEDR

SEQ ID NO: 3696 - protein, 5 aa, Artificial Sequence
  DME variant alteration
SFSSH

SEQ ID NO: 3697 - protein, 4 aa, Artificial Sequence
  DME variant alteration
SFVI

SEQ ID NO: 3698 - protein, 5 aa, Artificial Sequence
  DME variant alteration
SFVIE

SEQ ID NO: 3699 - protein, 8 aa, Artificial Sequence
  DME variant alteration
SFVIEGLK

SEQ ID NO: 3700 - protein, 4 aa, Artificial Sequence
  DME variant alteration
SFYR

SEQ ID NO: 3701 - protein, 4 aa, Artificial Sequence
  DME variant alteration
SGCV

SEQ ID NO: 3702 - protein, 4 aa, Artificial Sequence
  DME variant alteration
SGEI

SEQ ID NO: 3703 - protein, 5 aa, Artificial Sequence
  DME variant alteration
SGEIV

SEQ ID NO: 3704 - protein, 5 aa, Artificial Sequence
  DME variant alteration
SHCRD

SEQ ID NO: 3705 - protein, 4 aa, Artificial Sequence
  DME variant alteration
SHLQ

SEQ ID NO: 3706 - protein, 6 aa, Artificial Sequence
  DME variant alteration
SHLQNS

SEQ ID NO: 3707 - protein, 7 aa, Artificial Sequence
  DME variant alteration
SHRPVQE

SEQ ID NO: 3708 - protein, 4 aa, Artificial Sequence
  DME variant alteration
SHTA

SEQ ID NO: 3709 - protein, 9 aa, Artificial Sequence
  DME variant alteration
SHTAWASSD

SEQ ID NO: 3710 - protein, 7 aa, Artificial Sequence
  DME variant alteration
SIHVTRE

SEQ ID NO: 3711 - protein, 4 aa, Artificial Sequence
  DME variant alteration
SKQY

SEQ ID NO: 3712 - protein, 5 aa, Artificial Sequence
  DME variant alteration
SKQYN

SEQ ID NO: 3713 - protein, 6 aa, Artificial Sequence
  DME variant alteration
SKTLAQ

SEQ ID NO: 3714 - protein, 8 aa, Artificial Sequence
  DME variant alteration
SKTLAQYT

SEQ ID NO: 3715 - protein, 5 aa, Artificial Sequence
  DME variant alteration
SKTYL

SEQ ID NO: 3716 - protein, 6 aa, Artificial Sequence
  DME variant alteration
SLGKFG

SEQ ID NO: 3717 - protein, 7 aa, Artificial Sequence
  DME variant alteration
SLGKFGQ

SEQ ID NO: 3718 - protein, 5 aa, Artificial Sequence
  DME variant alteration
SLKLA

SEQ ID NO: 3719 - protein, 4 aa, Artificial Sequence
  DME variant alteration
SLLK

SEQ ID NO: 3720 - protein, 5 aa, Artificial Sequence
  DME variant alteration
SLLKK

SEQ ID NO: 3721 - protein, 6 aa, Artificial Sequence
  DME variant alteration
SLLKKR

SEQ ID NO: 3722 - protein, 8 aa, Artificial Sequence
  DME variant alteration
SLLKKRFS

SEQ ID NO: 3723 - protein, 4 aa, Artificial Sequence
  DME variant alteration
SNHP

SEQ ID NO: 3724 - protein, 7 aa, Artificial Sequence
  DME variant alteration
SNHPVKP

SEQ ID NO: 3725 - protein, 4 aa, Artificial Sequence
  DME variant alteration
SNIK

SEQ ID NO: 3726 - protein, 4 aa, Artificial Sequence
  DME variant alteration
SPAR

SEQ ID NO: 3727 - protein, 5 aa, Artificial Sequence
  DME variant alteration
SPERR

SEQ ID NO: 3728 - protein, 5 aa, Artificial Sequence
  DME variant alteration
SRFKD

SEQ ID NO: 3729 - protein, 7 aa, Artificial Sequence
  DME variant alteration
SRTATQR

SEQ ID NO: 3730 - protein, 4 aa, Artificial Sequence
  DME variant alteration
SSSL

SEQ ID NO: 3731 - protein, 8 aa, Artificial Sequence
  DME variant alteration
SSSLASGL

SEQ ID NO: 3732 - protein, 4 aa, Artificial Sequence
  DME variant alteration
SVNN

SEQ ID NO: 3733 - protein, 6 aa, Artificial Sequence
  DME variant alteration
SVNNDI

SEQ ID NO: 3734 - protein, 5 aa, Artificial Sequence
  DME variant alteration
SVSSK

SEQ ID NO: 3735 - protein, 5 aa, Artificial Sequence
  DME variant alteration
SWLFL

SEQ ID NO: 3736 - protein, 6 aa, Artificial Sequence
  DME variant alteration
TAKLAY

SEQ ID NO: 3737 - protein, 8 aa, Artificial Sequence
  DME variant alteration
TAKLAYEG

SEQ ID NO: 3738 - protein, 4 aa, Artificial Sequence
  DME variant alteration
TCSN

SEQ ID NO: 3739 - protein, 6 aa, Artificial Sequence
  DME variant alteration
TCSNCG

SEQ ID NO: 3740 - protein, 8 aa, Artificial Sequence
  DME variant alteration
TCSNCGFT

SEQ ID NO: 3741 - protein, 8 aa, Artificial Sequence
  DME variant alteration
TDKRAFVE

SEQ ID NO: 3742 - protein, 5 aa, Artificial Sequence
  DME variant alteration
TDPEG

SEQ ID NO: 3743 - protein, 7 aa, Artificial Sequence
  DME variant alteration
TDPEGCP

SEQ ID NO: 3744 - protein, 4 aa, Artificial Sequence
  DME variant alteration
TFER

SEQ ID NO: 3745 - protein, 6 aa, Artificial Sequence
  DME variant alteration
TFERRE

SEQ ID NO: 3746 - protein, 7 aa, Artificial Sequence
  DME variant alteration
TFERREV

SEQ ID NO: 3747 - protein, 6 aa, Artificial Sequence
  DME variant alteration
THAAEQ

SEQ ID NO: 3748 - protein, 7 aa, Artificial Sequence
  DME variant alteration
THAAEQA

SEQ ID NO: 3749 - protein, 8 aa, Artificial Sequence
  DME variant alteration
THAAEQAA

SEQ ID NO: 3750 - protein, 4 aa, Artificial Sequence
  DME variant alteration
TIQA

SEQ ID NO: 3751 - protein, 4 aa, Artificial Sequence
  DME variant alteration
TKYQ

SEQ ID NO: 3752 - protein, 5 aa, Artificial Sequence
  DME variant alteration
TKYQD

SEQ ID NO: 3753 - protein, 6 aa, Artificial Sequence
  DME variant alteration
TLAQYT

SEQ ID NO: 3754 - protein, 5 aa, Artificial Sequence
  DME variant alteration
TLPPQ

SEQ ID NO: 3755 - protein, 7 aa, Artificial Sequence
  DME variant alteration
TLPPQPH

SEQ ID NO: 3756 - protein, 5 aa, Artificial Sequence
  DME variant alteration
TNYFG

SEQ ID NO: 3757 - protein, 8 aa, Artificial Sequence
  DME variant alteration
TNYFGRCN

SEQ ID NO: 3758 - protein, 10 aa, Artificial Sequence
  DME variant alteration
TPTTSADATC

SEQ ID NO: 3759 - protein, 4 aa, Artificial Sequence
  DME variant alteration
TRME

SEQ ID NO: 3760 - protein, 5 aa, Artificial Sequence
  DME variant alteration
TSKTC

SEQ ID NO: 3761 - protein, 4 aa, Artificial Sequence
  DME variant alteration
TTIN

SEQ ID NO: 3762 - protein, 5 aa, Artificial Sequence
  DME variant alteration
TTING

SEQ ID NO: 3763 - protein, 7 aa, Artificial Sequence
  DME variant alteration
TTINGKE

SEQ ID NO: 3764 - protein, 8 aa, Artificial Sequence
  DME variant alteration
VAKPLLQQ

SEQ ID NO: 3765 - protein, 4 aa, Artificial Sequence
  DME variant alteration
VAQI

SEQ ID NO: 3766 - protein, 5 aa, Artificial Sequence
  DME variant alteration
VASFL

SEQ ID NO: 3767 - protein, 6 aa, Artificial Sequence
  DME variant alteration
VASFLT

SEQ ID NO: 3768 - protein, 4 aa, Artificial Sequence
  DME variant alteration
VCLN

SEQ ID NO: 3769 - protein, 5 aa, Artificial Sequence
  DME variant alteration
VCLNC

SEQ ID NO: 3770 - protein, 6 aa, Artificial Sequence
  DME variant alteration
VCNVKK

SEQ ID NO: 3771 - protein, 8 aa, Artificial Sequence
  DME variant alteration
VCNVKKLI

SEQ ID NO: 3772 - protein, 5 aa, Artificial Sequence
  DME variant alteration
VDWWD

SEQ ID NO: 3773 - protein, 4 aa, Artificial Sequence
  DME variant alteration
VEGQ

SEQ ID NO: 3774 - protein, 6 aa, Artificial Sequence
  DME variant alteration
VEGQIT

SEQ ID NO: 3775 - protein, 4 aa, Artificial Sequence
  DME variant alteration
VEQR

SEQ ID NO: 3776 - protein, 5 aa, Artificial Sequence
  DME variant alteration
VEQRR

SEQ ID NO: 3777 - protein, 7 aa, Artificial Sequence
  DME variant alteration
VERQANE

SEQ ID NO: 3778 - protein, 4 aa, Artificial Sequence
  DME variant alteration
VIEK

SEQ ID NO: 3779 - protein, 7 aa, Artificial Sequence
  DME variant alteration
VIEKTLY

SEQ ID NO: 3780 - protein, 8 aa, Artificial Sequence
  DME variant alteration
VIEKTLYN

SEQ ID NO: 3781 - protein, 5 aa, Artificial Sequence
  DME variant alteration
VKDLS

SEQ ID NO: 3782 - protein, 5 aa, Artificial Sequence
  DME variant alteration
VKKLN

SEQ ID NO: 3783 - protein, 5 aa, Artificial Sequence
  DME variant alteration
VKPLE

SEQ ID NO: 3784 - protein, 7 aa, Artificial Sequence
  DME variant alteration
VKPLEQI

SEQ ID NO: 3785 - protein, 8 aa, Artificial Sequence
  DME variant alteration
VLDSSNIK

SEQ ID NO: 3786 - protein, 4 aa, Artificial Sequence
  DME variant alteration
VLEK

SEQ ID NO: 3787 - protein, 4 aa, Artificial Sequence
  DME variant alteration
VPSK

SEQ ID NO: 3788 - protein, 4 aa, Artificial Sequence
  DME variant alteration
VSCK

SEQ ID NO: 3789 - protein, 5 aa, Artificial Sequence
  DME variant alteration
VSEHE

SEQ ID NO: 3790 - protein, 7 aa, Artificial Sequence
  DME variant alteration
VSEHERL

SEQ ID NO: 3791 - protein, 8 aa, Artificial Sequence
  DME variant alteration
VSEHERLI

SEQ ID NO: 3792 - protein, 4 aa, Artificial Sequence
  DME variant alteration
VSIK

SEQ ID NO: 3793 - protein, 11 aa, Artificial Sequence
  DME variant alteration
VSIKDLQASNK

SEQ ID NO: 3794 - protein, 4 aa, Artificial Sequence
  DME variant alteration
VSRK

SEQ ID NO: 3795 - protein, 4 aa, Artificial Sequence
  DME variant alteration
VSSE

SEQ ID NO: 3796 - protein, 11 aa, Artificial Sequence
  DME variant alteration
VSSEDLQASNK

SEQ ID NO: 3797 - protein, 4 aa, Artificial Sequence
  DME variant alteration
VSSK

SEQ ID NO: 3798 - protein, 5 aa, Artificial Sequence
  DME variant alteration
VSSKA

SEQ ID NO: 3799 - protein, 5 aa, Artificial Sequence
  DME variant alteration
VSSKD

SEQ ID NO: 3800 - protein, 5 aa, Artificial Sequence
  DME variant alteration
VSSKD

SEQ ID NO: 3801 - protein, 7 aa, Artificial Sequence
  DME variant alteration
VSSKDFQ

SEQ ID NO: 3802 - protein, 6 aa, Artificial Sequence
  DME variant alteration
VSSKDH

SEQ ID NO: 3803 - protein, 6 aa, Artificial Sequence
  DME variant alteration
VSSKDI

SEQ ID NO: 3804 - protein, 6 aa, Artificial Sequence
  DME variant alteration
VSSKDL

SEQ ID NO: 3805 - protein, 7 aa, Artificial Sequence
  DME variant alteration
VSSKDLE

SEQ ID NO: 3806 - protein, 7 aa, Artificial Sequence
  DME variant alteration
VSSKDLH

SEQ ID NO: 3807 - protein, 10 aa, Artificial Sequence
  DME variant alteration
VSSKDLHASN

SEQ ID NO: 3808 - protein, 7 aa, Artificial Sequence
  DME variant alteration
VSSKDLK

SEQ ID NO: 3809 - protein, 7 aa, Artificial Sequence
  DME variant alteration
VSSKDLQ

SEQ ID NO: 3810 - protein, 8 aa, Artificial Sequence
  DME variant alteration
VSSKDLQA

SEQ ID NO: 3811 - protein, 10 aa, Artificial Sequence
  DME variant alteration
VSSKDLQACL

SEQ ID NO: 3812 - protein, 9 aa, Artificial Sequence
  DME variant alteration
VSSKDLQAS

SEQ ID NO: 3813 - protein, 10 aa, Artificial Sequence
  DME variant alteration
VSSKDLQASN

SEQ ID NO: 3814 - protein, 11 aa, Artificial Sequence
  DME variant alteration
VSSKDLQASNK

SEQ ID NO: 3815 - protein, 11 aa, Artificial Sequence
  DME variant alteration
VSSKDLQASNN

SEQ ID NO: 3816 - protein, 11 aa, Artificial Sequence
  DME variant alteration
VSSKDLQASNT

SEQ ID NO: 3817 - protein, 8 aa, Artificial Sequence
  DME variant alteration
VSSKDLQE

SEQ ID NO: 3818 - protein, 8 aa, Artificial Sequence
  DME variant alteration
VSSKDLQG

SEQ ID NO: 3819 - protein, 7 aa, Artificial Sequence
  DME variant alteration
VSSKDLR

SEQ ID NO: 3820 - protein, 8 aa, Artificial Sequence
  DME variant alteration
VSSKDLRA

SEQ ID NO: 3821 - protein, 7 aa, Artificial Sequence
  DME variant alteration
VSSKDLV

SEQ ID NO: 3822 - protein, 6 aa, Artificial Sequence
  DME variant alteration
VSSKDP

SEQ ID NO: 3823 - protein, 6 aa, Artificial Sequence
  DME variant alteration
VSSKDQ

SEQ ID NO: 3824 - protein, 6 aa, Artificial Sequence
  DME variant alteration
VSSKDV

SEQ ID NO: 3825 - protein, 7 aa, Artificial Sequence
  DME variant alteration
VSSKDVQ

SEQ ID NO: 3826 - protein, 5 aa, Artificial Sequence
  DME variant alteration
VSSKE

SEQ ID NO: 3827 - protein, 7 aa, Artificial Sequence
  DME variant alteration
VSSKVLQ

SEQ ID NO: 3828 - protein, 11 aa, Artificial Sequence
  DME variant alteration
VSSKYLQASNK

SEQ ID NO: 3829 - protein, 4 aa, Artificial Sequence
  DME variant alteration
VSSN

SEQ ID NO: 3830 - protein, 5 aa, Artificial Sequence
  DME variant alteration
VSSND

SEQ ID NO: 3831 - protein, 7 aa, Artificial Sequence
  DME variant alteration
VSSNDLQ

SEQ ID NO: 3832 - protein, 10 aa, Artificial Sequence
  DME variant alteration
VSSNDLQASN

SEQ ID NO: 3833 - protein, 11 aa, Artificial Sequence
  DME variant alteration
VSSNDLQASNK

SEQ ID NO: 3834 - protein, 4 aa, Artificial Sequence
  DME variant alteration
VSSR

SEQ ID NO: 3835 - protein, 4 aa, Artificial Sequence
  DME variant alteration
VVAQ

SEQ ID NO: 3836 - protein, 5 aa, Artificial Sequence
  DME variant alteration
VVAQI

SEQ ID NO: 3837 - protein, 8 aa, Artificial Sequence
  DME variant alteration
VVKDLSVE

SEQ ID NO: 3838 - protein, 5 aa, Artificial Sequence
  DME variant alteration
VWKPA

SEQ ID NO: 3839 - protein, 6 aa, Artificial Sequence
  DME variant alteration
VWKPAV

SEQ ID NO: 3840 - protein, 8 aa, Artificial Sequence
  DME variant alteration
WGKVYDEA

SEQ ID NO: 3841 - protein, 4 aa, Artificial Sequence
  DME variant alteration
WLFL

SEQ ID NO: 3842 - protein, 5 aa, Artificial Sequence
  DME variant alteration
WNDLL

SEQ ID NO: 3843 - protein, 4 aa, Artificial Sequence
  DME variant alteration
WPRS

SEQ ID NO: 3844 - protein, 5 aa, Artificial Sequence
  DME variant alteration
WTKGR

SEQ ID NO: 3845 - protein, 5 aa, Artificial Sequence
  DME variant alteration
WVNLN

SEQ ID NO: 3846 - protein, 5 aa, Artificial Sequence
  DME variant alteration
WWDMV

SEQ ID NO: 3847 - protein, 6 aa, Artificial Sequence
  DME variant alteration
YDEAWE

SEQ ID NO: 3848 - protein, 6 aa, Artificial Sequence
  DME variant alteration
YEGLPS

SEQ ID NO: 3849 - protein, 5 aa, Artificial Sequence
  DME variant alteration
YGDLR

SEQ ID NO: 3850 - protein, 5 aa, Artificial Sequence
  DME variant alteration
YKKYQ

SEQ ID NO: 3851 - protein, 5 aa, Artificial Sequence
  DME variant alteration
YLIIN

SEQ ID NO: 3852 - protein, 7 aa, Artificial Sequence
  DME variant alteration
YLSKTLA

SEQ ID NO: 3853 - protein, 6 aa, Artificial Sequence
  DME variant alteration
YNRRTR

SEQ ID NO: 3854 - protein, 5 aa, Artificial Sequence
  DME variant alteration
YNRYK

SEQ ID NO: 3855 - protein, 4 aa, Artificial Sequence
  DME variant alteration
YQFG

SEQ ID NO: 3856 - protein, 4 aa, Artificial Sequence
  DME variant alteration
YQTN

SEQ ID NO: 3857 - protein, 4 aa, Artificial Sequence
  DME variant alteration
YTRM

SEQ ID NO: 3858 - protein, 5 aa, Artificial Sequence
  DME variant alteration
YTRME

SEQ ID NO: 3859 - protein, 6 aa, Artificial Sequence
  DME variant alteration
YTRMED

SEQ ID NO: 3860 - protein, 4 aa, Artificial Sequence
  DME variant alteration
YTSK

SEQ ID NO: 3861 - protein, 7 aa, Artificial Sequence
  DME variant alteration
YTVINKK

SEQ ID NO: 3862 - protein, 7 aa, Artificial Sequence
  DME variant alteration
YVSSKDL

SEQ ID NO: 3863 - protein, 8 aa, Artificial Sequence
  DME variant alteration
YVSSKDLQ

SEQ ID NO: 3864 - protein, 9 aa, Artificial Sequence
  DME variant alteration
YVSSKDLQA

SEQ ID NO: 3865 - protein, 6 aa, Artificial Sequence
  DME variant alteration
YYAVTQ

SEQ ID NO: 3866 - protein, 977 aa, Artificial Sequence; identical to SEQ ID NO: 263
  CasX Protein Variant

SEQ ID NO: 3867 - protein, 978 aa, Artificial Sequence
  CasX Protein Variant
MQEIKRINKIRRRLVKDSNTKKAGKTGPMKTLLVRVMTPDLRERLENLRKKPENIPQPISNTSRANLNKLLTDYTEMKKAILHVYWEEFQKDPVGLMSRVAQPAPKNIDQRKLIPVKDGNERLTSSGFACSQCCQPLYVYKLEQVNDKGKPHTNYFGRCNVSEHERLILLSPHKPEANDELVTYSLGKFGQRALDFYSIHVTRESNHPVKPLEQIGGNSCASGPVGKALSDACMGAVASFLTKYQDIILEHQKVIKKNEKRLANLKDIASANGLAFPKITLPPQPHTKEGIEAYNNVVAQIVIWVNLNLWQKLKIGRDEAKPLQRLKGFPSFPLVERQANEVDWWDMVCNVKKLINEKKEDGKVFWQNLAGYKRQEALLPYLSSEEDRKKGKKFARYQFGDLLLHLEKKHGEDWGKVYDEAWERIDKKVEGLSKHIKLEEERRSEDAQSKAALTDWLRAKASFVIEGLKEADKDEFCRCELKLQKWYGDLRGKPFAIEAENSILDISGFSKQYNCAFIWQKDGVKKLNLYLIINYFKGGKLRFKKIKPEAFEANRFYTVINKKSGEIVPMEVNFNFDDPNLIILPLAFGKRQGREFIWNDLLSLETGSLKLANGRVIEKTLYNRRTRQDEPALFVALTFERREVLDSSNIKPMNLIGIDRGENIPAVIALTDPEGCPLSRFKDSLGNPTHILRIGESYKEKQRTIQAAKEVEQRRAGGYSRKYASKAKNLADDMVRNTARDLLYYAVTQDAMLIFENLSRGFGRQGKRTFAAERQYTRMEDWLTAKLAYEGLPSKTYLSKTLAQYTSKTCSNCGFTITSADYDRVLEKLKKTATGWMTTINGKELKVEGQITYYNRYKRQNVVKDLSVELDRLSEESVNNDISSWTKGRSGEALSLLKKRFSHRPVQEKFVCLNCGFETHADEQAALNIARSWLFLRSQEYKKYQTNKTTGNTDKRAFVETWQSFYRKKLKEVWKPAV

SEQ ID NO: 3868 - protein, 977 aa, Artificial Sequence; identical to SEQ ID NO: 265
  CasX Protein Variant

SEQ ID NO: 3869 - protein, 978 aa, Artificial Sequence; identical to SEQ ID NO: 266
  CasX Protein Variant

SEQ ID NO: 3870 - protein, 978 aa, Artificial Sequence; identical to SEQ ID NO: 267
  CasX Protein Variant

SEQ ID NO: 3871 - protein, 978 aa, Artificial Sequence; identical to SEQ ID NO: 268
  CasX Protein Variant

SEQ ID NO: 3872 - protein, 977 aa, Artificial Sequence; identical to SEQ ID NO: 269
  CasX Protein Variant

SEQ ID NO: 3873 - protein, 977 aa, Artificial Sequence; identical to SEQ ID NO: 270
  CasX Protein Variant

SEQ ID NO: 3874 - protein, 977 aa, Artificial Sequence; identical to SEQ ID NO: 271
  CasX Protein Variant

SEQ ID NO: 3875 - protein, 977 aa, Artificial Sequence; identical to SEQ ID NO: 272
  CasX Protein Variant

SEQ ID NO: 3876 - protein, 978 aa, Artificial Sequence; identical to SEQ ID NO: 273
  CasX Protein Variant

SEQ ID NO: 3877 - protein, 977 aa, Artificial Sequence; identical to SEQ ID NO: 274
  CasX Protein Variant

SEQ ID NO: 3878 - protein, 977 aa, Artificial Sequence; identical to SEQ ID NO: 275
  CasX Protein Variant

SEQ ID NO: 3879 - protein, 977 aa, Artificial Sequence; identical to SEQ ID NO: 276
  CasX Protein Variant

SEQ ID NO: 3880 - protein, 977 aa, Artificial Sequence; identical to SEQ ID NO: 277
  CasX Protein Variant

SEQ ID NO: 3881 - protein, 977 aa, Artificial Sequence; identical to SEQ ID NO: 278
  CasX Protein Variant

SEQ ID NO: 3882 - protein, 978 aa, Artificial Sequence; identical to SEQ ID NO: 279
  CasX Protein Variant

SEQ ID NO: 3883 - protein, 978 aa, Artificial Sequence; identical to SEQ ID NO: 280
  CasX Protein Variant

SEQ ID NO: 3884 - protein, 977 aa, Artificial Sequence; identical to SEQ ID NO: 281
  CasX Protein Variant

SEQ ID NO: 3885 - protein, 977 aa, Artificial Sequence; identical to SEQ ID NO: 282
  CasX Protein Variant

SEQ ID NO: 3886 - protein, 977 aa, Artificial Sequence; identical to SEQ ID NO: 283
  CasX Protein Variant

SEQ ID NO: 3887 - protein, 978 aa, Artificial Sequence; identical to SEQ ID NO: 284
  CasX Protein Variant

SEQ ID NO: 3888 - protein, 978 aa, Artificial Sequence; identical to SEQ ID NO: 285
  CasX Protein Variant

SEQ ID NO: 3889 - protein, 977 aa, Artificial Sequence; identical to SEQ ID NO: 286
  CasX Protein Variant

SEQ ID NO: 3890 - protein, 978 aa, Artificial Sequence; identical to SEQ ID NO: 287
  CasX Protein Variant

SEQ ID NO: 3891 - protein, 977 aa, Artificial Sequence
  CasX Protein Variant
MQEIKRINKIRRRLVKDSNTKKAGKTGPMKTLLVRVMTPDLRERLENLRKKPENIPQPISNTSRANLNKLLTDYTEMKKAILHVYWEEFQKDPVGLMSRVAQPAPKNIDQRKLIPVKDGNERLTSSGFACSQCCQPLYVYKLEQVNDKGKPHTNYFGRCNVSEHERLILLSPHKPEANDELVTYSLGKFGQRALDFYSIHVTRESNHPVKPLEQIGGNSCASGPVGKALSDACMGAVASFLTKYQDIILEHQKVIKKNEKRLANLKDIASANGLAFPKITLPPQPHTKEGIEAYNNVVAQIVIWVNLNLWQKLKIGRDEAKPLQRLKGFPSFPLVERQANEVDWWDMVCNVKKLINEKKEDGKVFWQNLAGYKRQEALRPYLSSEEDRKKGKKFARYQFGDLLLHLEKKHGEDWGKVYDEAWERIDKKVEGLSKHIKLEEERRSEDAQSKAALTDWLRAKASFVIEGLKEADKDEFCRCELKLQKWYGDLRGKPFAIEAENSILDISGFSKQYNCAFIWQKDGVKKLNLYLIINYFKGGKLRFKKIKPEAFEANRFYTVINKKSGEIVPMEVNFNFDDPNLIILPLAFGKRQGREFIWNDLLSLETGSLKLANGRVIEKTLYNRRTRQDEPALFVALTFERREVLDSSNIKPMNLIGIDRGENIPAVIALTDPEGCPLSRFKDSLGNPTHILRIGESYKEKQRTIQAKKEVEQRRAGGYSRKYASKAKNLADDMVRNTARDLLYYAVTQDAMLIFENLSRGFGRQGKRTFMAERQYTRMEDWLTAKLAYEMLSKTYLSKTLAQYTSKTCSNCGFTITSADYDRVLEKLKKTATGWMTTINGKELKVEGQITYYNRYKRQNVVKDLSVELDRLSEESVNNDISSWTKGRSGEALSLLKKRFSHRPVQEKFVCLNCGFETHADEQAALNIARSWLFLRSQEYKKYQTNKTTGNTDKRAFVETWQSFYRKKLKEVWKPAV

SEQ ID NO: 3892 - protein, 977 aa, Artificial Sequence
  CasX Protein Variant
MQEIKRINKIRRRLVKDSNTKKAGKTGPMKTLLVRVMTPDLRERLENLRKKPENIPQPISNTSRANLNKLLTDYTEMKKAILHVYWEEFQKDPVGLMSRVAQPAPKNIDQRKLIPVKDGNERLTSSGFACSQCCQPLYVYKLEQVNDKGKPHTNYFGRCNVSEHERLILLSPHKPEANDELVTYSLGKFGQRALDFYSIHVTRESNHPVKPLEQIGGNSCASGPVGKALSDACMGAVASFLTKYQDIILEHQKVIKKNEKRLANLKDIASANGLAFPKITLPPQPHTKEGIEAYNNVVAQIVIWVNLNLWQKLKIGRDEAKPLQRLKGFPSFPLVERQANEVDWWDMVCNVKKLINEKKEDGKVFWQNLAGYKRQEALLPYLSSERDRKKGKKFARYQLGDLLLHLEKKHGEDWGKVYDEAWERIDKKVEGLSKHIKLEEERRSEDAQSKAALTDWLRAKASFVIEGLKEADKDEFCRCELKLQKWYGDLRGKPFAIEAENSILDISGFSKQYNCAFIWQKDGVKKLNLYLIINYFKGGKLRFKKIKPEAFEANRFYTVINKKSGEIVPMEVNFNFDDPNLIILPLAFGKRQGREFIWNDLLSLETGSLKLANGRVIEKTLYNRRTRQDEPALFVALTFERREVLDSSNIKPMNLIGIDRGENIPAVIALTDPEGCPLSRFKDSLGNPTHILRIGESYKEKQRTIQAAKEVEQRRAGGYSRKYASKAKNLADDMVRNTARDLLYYAVTQDAMLIFENLSRGFGRQGKRTFMAERQYTRMEDWLTAKLAYEGLSKTYLSKTLAQYTSKTCSNCGFTITSADYDRVLEKLKKTATGWMTTINGKELKVEGQITYYNRYKRQNVVKDLSVELDRLSEESVNNDISSWTKGRSGEALSLLKKRFSHRPVQEKFVCLNCGFETHADEQAALNIARSWLFLRSQEYKKYQTNKTTGNTDKRAFVETWQSFYRKKLKEVWKPAV

SEQ ID NO: 3893 - protein, 977 aa, Artificial Sequence
  CasX Protein Variant
MQEIKRINKIRRRLVKDSNTKKAGKTGPMKTLLVRVMTPDLRERLENLRKKPENIPQPISNTSRANLNKLLTDYTEMKKAILHVYWEEFQKDPVGLMSRVAQPAPKNIDQRKLIPVKDGNERLTSSGFACSQCCQPLYVYKLEQVNDKGKPHTNYFGRCNVSEHERLILLSPHKPEANDELVTYSLGKFGQRALDFYSIHVTRESNHPVKPLEQIGGNSCASGPVGKALSDACMGAVASFLTKYQDIILEHQKVIKKNEKRLANLKDIASANGLAFPKITLPPQPHTKEGIEAYNNVVAQIVIWVNLNLWQKLKIGRDEAKPLQRLKGFPSFPLVERQANEVDWWDMVCNVKKLINEKKEDGKVFWQNLAGYKRQEALLPYLSSEEDRKKGKKFARYQFGDLLLHLEKKHGEDWGKVYDEAWERIDKKVEGLSKHIKLEEERRSEDAQSKAALTDWLRAKASFVIEGLKEADKDEFCRCELKLQKWYGDLRGKPFAIEAENSILDISGFSKQYNCAFIWQKDGVKKLNLYLIINYFKGGKLRFKKIKPEAFEANRFYTVINKKSGEIVPMEVNFNFDDPNLIILPLAFGKRQGREFIWNDLLSLETGSLKLANGRVIEKTLYNRRTRQDEPALFVALTFERREVLDSSNIKPMNLIGIDRGENIPAVIALTDPEGCPLSRFKDSLGNPTHILRIGESYKEKQRTIQAKKEVEQRRAGGYSRKYASKAKNLADDMVRNTARDLLYYAVTQDAMLIFENLSRGFGRQGKRTFMAERQYTRMEDWLTAKLAYEGLSKTYLSKTLAQYTSKTCSNCGFTITSADYDRVLEKLKKTATGWMTTINGKELKVEGQITYYNRYKRQNVVKDLSVELDRLSEESVNNDISSWTKGRSGEALSLLKKRFSHRPVQEKFVCLNCGFETHADEQAALNIARSWLFLRSQEYKKYQTNKTTGNTDKRAFVETWQSFYRKKLKEVWKPAV

SEQ ID NO: 3894 - protein, 978 aa, Artificial Sequence
  CasX Protein Variant
MQEIKRINKIRRRLVKDSNTKKAGKTGPMKTLLVRVMTPDLRERLENLRKKPENIPQPISNTSRANLNKLLTDYTEMKKAILHVYWEEFQKDPVGLMSRVAQPAPKNIDQRKLIPVKDGNERLTSSGFACSQCCQPLYVYKLEQVNDKGKPHTNYFGRCNVSEHERLILLSPHKPEANDELVTYSLGKFGQRALDFYSIHVTRESNHPVKPLEQIGGNSCASGPVGKALSDACMGAVASFLTKYQDIILEHQKVIKKNEKRLANLKDIASANGLAFPKITLPPQPHTKEGIEAYNNVVAQIVIWVNLNLWQKLKIGRDEAKPLQRLKGFPSFPLVERQANEVDWWDMVCNVKKLINEKKEDGKVFWQNLAGYKRQEALLPYLSSEEDRKKGKKFARYQFGDLLKHLEKKHGEDWGKVYDEAWERIDKKVEGLSKHIKLEEERRSEDAQSKAALTDWLRAKASFVIEGLKEADKDEFCRCELKLQKWYGDLRGKPFAIEAENSILDISGFSKQYNCAFIWQKDGVKKLNLYLIINYFKGGKLRFKKIKPEAFEANRFYTVINKKSGEIVPMEVNFNFDDPNLIILPLAFGKRQGREFIWNDLLSLETGSLKLANGRVIEKTLYNRRTRQDEPALFVALTFERREVLDSSNIKPMNLIGIDRGENIPAVIALTDPEGCPLSRFKDSLGNPTHILRIGESYKEKQRTIQAAKEVEQRRAGGYSRKYASKAKNLADDMVRNTARDLLYYAVTQDAMLIFENLSRGFGRQGKRTFMAERQYTRMEDWLTAKLAYEGLPSKTYLSKTLAQYTSKTCSNCGFTITSADYDRVLEKLKKTATGWMTTINGKELKVEGQITYYNRYKRQNVVKDLSVELDRLSEESVNNDISSWTKGRSGEALSLLKKRFSHRPVQEKFVCLNCGFETHADEQAALNIARSWLFLRSQEYKKYQTNKTTGNTDKRAFVETWQSFYRKKLKEVWKPAV

SEQ ID NO: 3895 - protein, 978 aa, Artificial Sequence
  CasX Protein Variant
MQEIKRINKIRRRLVKDSNTKKAGKTGPMKTLLVRVMTPDLRERLENLRKKPENIPQPISNTSRANLNKLLTDYTEMKKAILHVYWEEFQKDPVGLMSRVAQPAPKNIDQRKLIPVKDGNERLTSSGFACSQCCQPLYVYKLEQVNDKGKPHTNYFGRCNVSEHERLILLSPHKPEANDELVTYSLGKFGQRALDFYSIHVTRESNHPVKPLEQIGGNSCASGPVGKALSDACMGAVASFLTKYQDIILEHQKVIKKNEKRLANLKDIASANGLAFPKITLPPQPHTKEGIEAYNNVVAQIVIWVNLNLWQKLKIGRDEAKPLQRLKGFPSFPLVERQANEVDWWDMVCNVKKLINEKKEDGKVFWQNLAGYKRQEALLPYLSSEEDRKKGKKFARYQFGDLLLHLEKKHGEDWGKVYDEAWERIDKKVEGLSKHIKLEEERRSEDAQSKAALTDWLRAKASFVIEGLKEADKDEFCRCELKLQKWYGDLRGKPFAIEAENSILDISGFSKQYNCAFIWQKDGVKKLNLYLIINYFKGGKLRFKKIKPEAFAANRFYTVINKKSGEIVPMEVNFNFDDPNLIILPLAFGKRQGREFIWNDLLSLETGSLKLANGRVIEKTLYNRRTRQDEPALFVALTFERREVLDSSNIKPMNLIGIDRGENIPAVIALTDPEGCPLSRFKDSLGNPTHILRIGESYKEKQRTIQAAKEVEQRRAGGYSRKYASKAKNLADDMVRNTARDLLYYAVTQDAMLIFENLSRGFGRQGKRTFMAERQYTRMEDWLTAKLAYEGLPSKTYLSKTLAQYTSKTCSNCGFTITSADYDRVLEKLKKTATGWMTTINGKELKVEGQITYYNRYKRQNVVKDLSVELDRLSEESVNNDISSWTKGRSGEALSLLKKRFSHRPVQEKFVCLNCGFETHADEQAALNIARSWLFLRSQEYKKYQTNKTTGNTDKRAFVETWQSFYRKKLKEVWKPAV

SEQ ID NO: 3896 - protein, 978 aa, Artificial Sequence
  CasX Protein Variant
MQEIKRINKIRRRLVKDSNTKKAGKTGPMKTLLVRVMTPDLRERLENLRKKPENIPQPISNTSRANLNKLLTDYTEMKKAILHVYWEEFQKDPVGLMSRVAQPAPKNIDQRKLIPVKDGNERLTSSGFACSQCCQPLYVYKLEQVNDKGKPHTNYFGRCNVSEHERLILLSPHKPEANDELVTYSLGKFGQRALDFYSIHVTRESNHPVKPLEQIGGNSCASGPVGKALSDACMGAVASFLTKYQDIILEHQKVIKKNEKRLANLKDIASANGLAFPKITLPPQPHTKEGIEAYNNVVAQIVIWVNLNLWQKLKIGRDEAKPLQRLKGFPSFPLVERQANEVDWWDMVCNVKKLINEKKEDGKVFWQNLAGYKRQEALLPYLSSEEDRKKGKKFARYQFGDLLLHLEKKHGEDWGKVYDEAWERIDKKVEGLSKHIKLEEERRSEDAQSKAALTDWLRAKASFVIEGLKEADKDEFCRCELKLQKWYGDLRGKPFAIEAENSILDISGFSKQYNCAFIWQKDGVKKLNLYLIINYFKGGKLRFKKIKPEAFEANRFYTVINKKSGEIVPMEVNFNFDDPNLIILPLAFGKRQGREFIWNDLLSLETGSLKLANGRVIEKTLYNRRTRQDEPALFVALTFERREVLDSSNIKPMNLIGIDRGENIPAVIALTDPEGCPLSRFKDSLGNPTHILRIGESYKEKQRTIQAKKEVEQRRAGGYSRKYASKAKNLADDMVRNTARDLLYYAVTQDAMLIFENLSRGFGRQGKRTFMAERQYTRMEDWLTAKLAYEGLPSKTYLSKTLAQYTSKTCSNCGFTITSADYDRVLEKLKKTATGWMTTINGKELKVEGQITYYNRYKRQNVVKDLSVELDRLSEESVNNDISSWTKGRSGEALSLLKKRFSHRPVQEKFVCLNCGFETHADEQAALNIARSWLFLRSQEYKKYQTNKTTGNTDKRAFVETWQSFYRKKLKEVWKPAV

SEQ ID NO: 3897 - protein, 978 aa, Artificial Sequence
  CasX Protein Variant
MQEIKRINKIRRRLVKDSNTKKAGKTGPMKTLLVRVMTPDLRERLENLRKKPENIPQPISNTSRANLNKLLTDYTEMKKAILHVYWEEFQKDPVGLMSRVAQPAPKNIDQRKLIPVKDGNERLTSSGFACSQCCQPLYVYKLEQVNDKGKPHTNYFGRCNVSEHERLILLSPHKPEANDELVTYSLGKFGQRALDFYSIHVTRESNHPVKPLEQIGGNSCASGPVGKALSDACMGAVASFLTKYQDIILEHQKVIKKNEKRLANLKDIASANGLAFPKITLPPQPHTKEGIEAYNNVVAQIVIWVNLNLWQKLKIGRDEAKPLQRLKGFPSFPLVERQANEVDWWDMVCNVKKLINEKKEDGKVFWQNLAGYKRQEALLPYLSSEEDRKKGKKFARYQFGDLLLHLEKKHGEDWGKVYDEAWERIDKKVEGLSKHIKLEEERRSEDAQSKAALTDWLRAKASFVIEGLKEADKDEFCRCELKLQKWYGDLRGKPFAIEAENSILDISGFSKQYNCAFIWQKDGVKKLNLYLIINYFKGGKLRFKKIKPEAFEANRFYTVINKKSGEIVPMEVNFNFDDPNLIILPLAFGKRQGREFIWNDLLSLETGSLKLANGRVIEKTLYNRRTRQDEPALFVALTFERREVLDSSNIKPMNLIGIDRGENIPAVIALTDPEGCPLSRFKDSLGNPTHILRIGESYKEKQRTIQAAKEVEQRRAGGYSRKYASKAKNLADDMVRNTARDLLYYAVTQDAMLIFENLSRGFGRQGKRTFMAERQYTRNEDWLTAKLAYEGLPSKTYLSKTLAQYTSKTCSNCGFTITSADYDRVLEKLKKTATGWMTTINGKELKVEGQITYYNRYKRQNVVKDLSVELDRLSEESVNNDISSWTKGRSGEALSLLKKRFSHRPVQEKFVCLNCGFETHADEQAALNIARSWLFLRSQEYKKYQTNKTTGNTDKRAFVETWQSFYRKKLKEVWKPAV

SEQ ID NO: 3898 - protein, 978 aa, Artificial Sequence
  CasX Protein Variant
MQEIKRINKIRRRLVKDSNTKKAGKTGPMKTLLVRVMTPDLRERLENLRKKPENIPQPISNTSRANLNKLLTDYTEMKKAILHVYWEEFQKDPVGLMSRVAQPAPKNIDQRKLIPVKDGNERLTSSGFACSQCCQPLYVYKLEQVNDKGKPHTNYFGRCNVSEHERLILLSPHKPEANDELVTYSLGKFGQRALDFYSIHVTRESNHPVKPLEQIGGNSCASGPVGKALSDACMGAVASFLTKYQDIILEHQKVIKKNEKRLANLKDIASANGLAFPKITLPPQPHTKEGIEAYNNVVAQIVIWVNLNLWQKLKIGRDEAKPLQRLKGFPSFPLVERQANEVDWWDMVCNVKKLINEKKEDGKVFWQNLAGYKRQEALLPYLSSEEDRKKGKKFARYQFGDLLLHLEKKHGEDWGKVYDEAWERIDKKVEGLSKHIKLEEERRSEDAQSKAALTDWLRAKASFVIEGLKEADKDEFCRCELKLQKWYGDLRGKPFAIEAENSILDISGFSKQYNCAFIWQKDGVKKLNLYLIINYFKGGKLRFKKIKPEAFEANRFYTVINKKSGEIVPMEVNFNFDDPNLIILPLAFGKRQGREFIWNDLLSLETGSLKLANGRVIEKTLYNRRTRQDEPALFVALTFERREVLDSSNIKPMNLIGIDRGENIPAVIALTDPEGCPLSRFKDSLGNPTHILRIGESYKEKQRTIQAAKEVEQRRAGGYSRKYASKAKNLADDMVRNTARDLLYYAVTQDAMLIFENLSRGFGRQGKRTFMAERQYTRMEDWLTAKLAYEGLGSKTYLSKTLAQYTSKTCSNCGFTITSADYDRVLEKLKKTATGWMTTINGKELKVEGQITYYNRYKRQNVVKDLSVELDRLSEESVNNDISSWTKGRSGEALSLLKKRFSHRPVQEKFVCLNCGFETHADEQAALNIARSWLFLRSQEYKKYQTNKTTGNTDKRAFVETWQSFYRKKLKEVWKPAV

SEQ ID NO: 3899 - protein, 977 aa, Artificial Sequence
  CasX Protein Variant
MQEIKRINKIRRRLVKDSNTKKAGKTGPMKTLLVRVMTPDLRERLENLRKKPENIPQPISNTSRANLNKLLTDYTEMKKAILHVYWEEFQKDPVGLMSRVAQPAPKNIDQRKLIPVKDGNERLTSSGFACSQCCQPLYVYKLEQVNDKGKPHTNYFGRCNVSEHERLILLSPHKPEANDELVTYSLGKFGQRALDFYSIHVTRESNHPVKPLEQIGGNSCASGPVGKALSDACMGAVASFLTKYQDIILEHQKVIKKNEKRLANLKDIASANGLAFPKITLPPQPHTKEGIEAYNNVVAQIVIWVNLNLWQKLKIGRDEAKPLQRLKGFPSFPLVERQANEVDWWDMVCNVKKLINEKKEDGKVFWQNLAGYKRQEALRPYLSSEEDRKKGKKFARYQFGDLLLHLEKKHGEDWGKVYDEAWERIDKKVEGLSKHIKLEEERRSEDAQSKAALTDWLRAKASFVIEGLKEADKDEFKRCELKLQKWYGDLRGKPFAIEAENSILDISGFSKQYNCAFIWQKDGVKKLNLYLIINYFKGGKLRFKKIKPEAFEANRFYTVINKKSGEIVPMEVNFNFDDPNLIILPLAFGKRQGREFIWNDLLSLETGSLKLANGRVIEKTLYNRRTRQDEPALFVALTFERREVLDSSNIKPMNLIGIDRGENIPAVIALTDPEGCPLSRFKDSLGNPTHILRIGESYKEKQRTIQAKKEVEQRRAGGYSRKYASKAKNLADDMVRNTVRDLLYYAVTQDAMLIFENLSRGFGRQGKRTFMAERQYTRMEDWLTAKLAYEGLSKTYLSKTLAQYTSKTCSNCGFTITSADYDRVLEKLKKTATGWMTTINGKELKVEGQITYYNRYKRQNVVKDLSVELDRLSEESVNNDISSWTKGRSGEALSLLKKRFSHRPVQEKFVCLNCGFETHADEQAALNIARSWLFLRSQEYKKYQTNKTTGNTDKRAFVETWQSFYRKKLKEVWKPAV

SEQ ID NO: 3900 - protein, 978 aa, Artificial Sequence
  CasX Protein Variant
MQEIKRINKIRRRLVKDSNTKKAGKTGPMKTLLVRVMTPDLRERLENLRKKPENIPQPISNTSRANLNKLLTDYTEMKKAILHVYWEEFQKDPVGLMSRVAQPAPKNIDQRKLIPVKDGNERLTSSGFACSQCCQPLYVYKLEQVNDKGKPHTNYFGRCNVSEHERLILLSPHKPEANDELVTYSLGKFGQRALDFYSIHVTRESNHPVKPLEQIGGNSCASGPVGKALSDACMGAVASFLTKYQDIILEHQKVIKKNEKRLANLKDIASANGLAFPKITLPPQPHTKEGIEAYNNVVAQIVIWVNLNLWQKLKIGRDEAKPLQRLKGFPSFPLVERQANEVDWWDMVCNVKKLINEKKEDGKVFWQNLAGYKRQEALLPYLSSEEDRKKGKKFARYQFGDLLLHLEKKHGEDWGKVYDEAWERIDKKVEGLSKHIKLEEERRSEDAQSKAALTDWLRAKASFVIEGLKEADKDEFCRCELKLQKWYGDLRGKPFAIEAENSILDISGFSKQYNCAFIWQKDGVKKLNLYLIINYFKGGKLRFKKIKPEAFEANRFYTVINKKSGEIVPMEVNFNFDDPNLIILPLAFGKRQGREFIWNDLLSLETGSLKLANGRVIEKTLYNRRTRQDEPALFVALTFERREVLDSSNIKPMNLIGIDRGENIPAVIALTDPEGCPLSRFKDSLGNPTHILRIGESYKEKQRTIQAAKEVEQRRAGGYSRKYASKAKNLADDMVRNTARDLLYYAVTQDAMLIFENLSRGFGRQGKRTFMAERQYTRMEDWLTAKLAYEGKPSKTYLSKTLAQYTSKTCSNCGFTITSADYDRVLEKLKKTATGWMTTINGKELKVEGQITYYNRYKRQNVVKDLSVELDRLSEESVNNDISSWTKGRSGEALSLLKKRFSHRPVQEKFVCLNCGFETHADEQAALNIARSWLFLRSQEYKKYQTNKTTGNTDKRAFVETWQSFYRKKLKEVWKPAV

SEQ ID NO: 3901 - protein, 977 aa, Artificial Sequence
  CasX Protein Variant
MQEIKRINKIRRRLVKDSNTKKAGKTGPMKTLLVRVMTPDLRERLENLRKKPENIPQPISNTSRANLNKLLTDYTEMKKAILHVYWEEFQKDPVGLMSRVAQPAPKNIDQRKLIPVKDGNERLTSSGFACSQCCQPLYVYKLEQVNDKGKPHTNYFGRCNVSEHERLILLSPHKPEANDELVTYSLGKFGQRALDFYSIHVTRESNHPVKPLEQIGGNSCASGPVGKALSDACMGAVASFLTKYQDIILEHQKVIKKNEKRLANLKDIASANGLAFPKITLPPQPHTKEGIEAYNNVVAQIVIWVNLNLWQKLKIGRDEAKPLQRLKGFPSFPLVERQANEVDWWDMVCNVKKLINEKKEDGKVFWQNLAGYKRQEALRPYLSSEEDRKKGKKFARYQFGDLLLHLEKKHGEDWGKVYDEAWERIDKKVEGLSKHIKLEEERRSEDAQSKAALTDWLRAKASFVIEGLKEADKDEFCRCELKLQKWYGDLRGKPFAIEAENSILDISGFSKQYNCAFIWQKDGVKKLNLYLIINYFKGGKLRFKKIKPEAFEANRFYTVINKKSGEIVPMEVNFNFDDPNLIILPLAFGKRQGREFIWNDLLSLETGSLKLANGRVIEKTLYNRRTRQDEPALFVALTFERREVLDSSNIKPMNLIGIDRGENIPAVIALTDPEGCPLSRFKDSLGNPTHILRIGESYKEKQRTIQAKKEVEQRRAGGYSRKYASKAKNLADDMVRNTARDLLYYAVTQDAMLIFENLSRGFGRQGKRTFMAERQYTRNEDWLTAKLAYEGLSKTYLSKTLAQYTSKTCSNCGFTITSADYDRVLEKLKKTATGWMTTINGKELKVEGQITYYNRYKRQNVVKDLSVELDRLSEESVNNDISSWTKGRSGEALSLLKKRFSHRPVQEKFVCLNCGFETHADEQAALNIARSWLFLRSQEYKKYQTNKTTGNTDKRAFVETWQSFYRKKLKEVWKPAV

SEQ ID NO: 3902 - protein, 980 aa, Artificial Sequence
  CasX Protein Variant
MQEIKRINKIRRRLVKDSNTKKAGKTGPMKTLLVRVMTPDLRERLENLRKKPENIPQPISNTSRANLNKLLTDYTEMKKAILHVYWEEFQKDPVGLMSRVAQPAPKNIDQRKLIPVKDGNERLTSSGFACSQCCQPLYVYKLEQVNDKGKPHTNYFGRCNVSEHERLILLSPHKPEANDELVTYSLGKFGQRALDFYSIHVTRESNHPVKPLEQIGGNSCASGPVGKALSDACMGAVASFLTKYQDIILEHQKVIKKNEKRLANLKDIASANGLAFPKITLPPQPHTKEGIEAYNNVVAQIVIWVNLNLWQKLKIGRDEAKPLQRLKGFPSFPLVERQANEVDWWDMVCNVKKLINEKKEDGKVFWQNLAGYKRQEALLPYLSSEEDRKKGKKFARYQFGDLLLHLEKKHGEDWGKVYDEAWERIDKKVEGLSKHIKLEEERRSEDAQSKAALTDWLRAKASFVIEGLKEADKDEFCRCELKLQKWYGDLRGKPFAIEAENSILDISGFSKQYNCAFIWQKDGVKKLNLYLIINYFKGGKLRFKKIKPEAFEANRFYTVINKKSGEIVPMEVNFNFDDPNLIILPLAFGKRQGREFIWNDLLSLETGSLKLANGRVIEKTLYNRRTRQDEPALFVALTFERREVLDSSNIKPMNLIGIDRGENIPAVIALTDPEGCPLSRFKDSLGNPTHILRIGESYKEKQRTIQAAKEVEQRRAGGYSRKYASKAKNLADDMVRNTARDLLYYAVTQDAMLIFENLSRGFGRQGKRTFMAERQYTRMEDWLTAKLAYEGLPSKTASYLSKTLAQYTSKTCSNCGFTITSADYDRVLEKLKKTATGWMTTINGKELKVEGQITYYNRYKRQNVVKDLSVELDRLSEESVNNDISSWTKGRSGEALSLLKKRFSHRPVQEKFVCLNCGFETHADEQAALNIARSWLFLRSQEYKKYQTNKTTGNTDKRAFVETWQSFYRKKLKEVWKPAV

SEQ ID NO: 3903 - protein, 978 aa, Artificial Sequence
  CasX Protein Variant
MQEIKRINKIRRRLVKDSNTKKAGKTGPMKTLLVRVMTPDLRERLENLRKKPENIPQPISNTSRANLNKLLTDYTEMKKAILHVYWEEFQKDPVGLMSRVAQPAPKNIDQRKLIPVKDGNERLTSSGFACSQCCQPLYVYKLEQVNDKGKPHTNYFGRCNVSEHERLILLSPHKPEANDELVTYSLGKFGQRALDFYSIHVTRESNHPVKPLEQIGGNSCASGPVGKALSDACMGAVASFLTKYQDIILEHQKVIKKNEKRLANLKDIASANGLAFPKITLPPQPHTKEGIEAYNNVVAQIVIWVNLNLWQKLKIGRDEAKPLQRLKGFPSFPLVERQANEVDWWDMVCNVKKLINEKKEDGKVFWQNLAGYKRQEALLPYLSSEEDRKKGKKFARYQFGDLLLHLEKKHGEDWGKVYDEAWERIDKKVEGLSKHIKLEEERRSEDAQSKAALTDWLRAKASFVIEGLKEADKDEFHRCELKLQKWYGDLRGKPFAIEAENSILDISGFSKQYNCAFIWQKDGVKKLNLYLIINYFKGGKLRFKKIKPEAFEANRFYTVINKKSGEIVPMEVNFNFDDPNLIILPLAFGKRQGREFIWNDLLSLETGSLKLANGRVIEKTLYNRRTRQDEPALFVALTFERREVLDSSNIKPMNLIGIDRGENIPAVIALTDPEGCPLSRFKDSLGNPTHILRIGESYKEKQRTIQAAKEVEQRRAGGYSRKYASKAKNLADDMVRNTARDLLYYAVTQDAMLIFENLSRGFGRQGKRTFMAERQYTRMEDWLTAKLAYEGLPSKTYLSKTLAQYTSKTCSNCGFTITSADYDRVLEKLKKTATGWMTTINGKELKVEGQITYYNRYKRQNVVKDLSVELDRLSEESVNNDISSWTKGRSGEALSLLKKRFSHRPVQEKFVCLNCGFETHADEQAALNIARSWLFLRSQEYKKYQTNKTTGNTDKRAFVETWQSFYRKKLKEVWKPAV

SEQ ID NO: 3904 - protein, 978 aa, Artificial Sequence
  CasX Protein Variant
MQEIKRINKIRRRLVKDSNTKKAGKTGPMKTLLVRVMTPDLRERLENLRKKPENIPQPISNTSRANLNKLLTDYTEMKKAILHVYWEEFQKDPVGLMSRVAQPAPKNIDQRKLIPVKDGNERLTSSGFACSQCCQPLYVYKLEQVNDKGKPHTNYFGRCNVSEHERLILLSPHKPEANDELVTYSLGKFGQRALDFYSIHVTRESNHPVKPLEQIGGNSCASGPVGKALSDACMGAVASFLTKYQDIILEHQKVIKKNEKRLANLKDIASANGLAFPKITLPPQPHTKEGIEAYNNVVAQIVIWVNLNLWQKLKIGRDEAKPLQRLKGFPSFPLVERQANEVDWWDMVCNVKKLINEKKEDGKVFWQNLAGYKRQEALLPYLSSEEDRKKGKKFARYQFGDLLLHLEKKHGEDWGKVYDEAWERIDKKVEGLSKHIKLEEERRSEDAQSKAALTDWLRAKASFVIEGLKEADKDEFCRCELKLQKWYGDLRGKPFAIEAENSILDISGFSKQYNCAFIWQKDGVKKLNLYLIINYFKGGKLRFKKIKPEAFEANRFYTVINKKSGEIVPMEVNFNFDDPNLIILPLAFGKRQGREFIWNDLLSLETGSLKLANGRVIEKTLYNRRTRQDEPALFVALTFERREVLDSSNIKPMNLIGIDRGENIPAVIALTDPEGCPLSRFKDSLGNPTHILRIGESYKEKQRTIQAAKEVEQRRAGGYSRKYASKAKNLADDMVRNTARDLLYYAVTQDAMLIFENLSRGFGRQGKRTFMAERQYTRMEDWLTAKLAYEGLPSKTYLSKTLAQYTSKTCSNCGFTITSADYDRVLEKLKKTATGWMTTINGKELKVEGQITYYNRRKRQNVVKDLSVELDRLSEESVNNDISSWTKGRSGEALSLLKKRFSHRPVQEKFVCLNCGFETHADEQAALNIARSWLFLRSQEYKKYQTNKTTGNTDKRAFVETWQSFYRKKLKEVWKPAV

SEQ ID NO: 3905 - protein, 978 aa, Artificial Sequence
  CasX Protein Variant
MQEIKRINKIRRRLVKDSNTKKAGKTGPMKTLLVRVMTPDLRERLENLRKKPENIPQPISNTSRANLNKLLTDYTEMKKAILHVYWEEFQKDPVGLMSRVAQPAPKNIDQRKLIPVKDGNERLTSSGFACSQCCQPLYVYKLEQVNDKGKPHTNYFGRCNVSEHERLILLSPHKPEANDELVTYSLGKFGQRALDFYSIHVTRESNHPVKPLEQIGGNSCASGPVGKALSDACMGAVASFLTKYQDIILEHQKVIKKNEKRLANLKDIASANGLAFPKITLPPQPHTKEGIEAYNNVVAQIVIWVNLNLWQKLKIGRDEAKPLQRLKGFPSFPLVERQANEVDWWDMVCNVKKLINEKKEDGKVFWQNLAGYKRQEALLPYLSSEEDRKKGKKFARYQFGDLLLHLEKKHGEDWGKVYDEAWERIDKKVEGLSKHIKLEEERRSEDAQSKAALTDWLRAKASFVIEGLKEADKDEFCRCELKLQKWYGDLRGKPFAIEAENSILDISGFSKQYNCAFIWQKDGVKKLNLYLIINYFKGGKLRFKKIKPEAFEANRFYTVINKKSGEIVPMEVNFNFDDPNLIILPLAFGKRQGREFIWNDLLSLETGSLKLANGRVIEKTLYNRRTRQDEPALFVALTFERREVLDSSNIKPMNLIGIDRGENIPAVIALTDPEGCPLSRFKDSLGNPTHILRIGESYKEKQRTIQAAKEVEQRRAGGYSRKYASKAKNLADDMVRNTARDWLYYAVTQDAMLIFENLSRGFGRQGKRTFMAERQYTRMEDWLTAKLAYEGLPSKTYLSKTLAQYTSKTCSNCGFTITSADYDRVLEKLKKTATGWMTTINGKELKVEGQITYYNRYKRQNVVKDLSVELDRLSEESVNNDISSWTKGRSGEALSLLKKRFSHRPVQEKFVCLNCGFETHADEQAALNIARSWLFLRSQEYKKYQTNKTTGNTDKRAFVETWQSFYRKKLKEVWKPAV

SEQ ID NO: 3906 - protein, 978 aa, Artificial Sequence
  CasX Protein Variant
MQEIKRINKIRRRLVKDSNTKKAGKTGPMKTLLVRVMTPDLRERLENLRKKPENIPQPISNTSRANLNKLLTDYTEMKKAILHVYWEEFQKDPVGLMSRVAQPAPKNIDQRKLIPVKDGNERLTSSGFACSQCCQPLYVYKLEQVNDKGKPHTNYFGRCNVSEHERLILLSPHKPEANDELVTYSLGKFGQRALDFYSIHVTRESNHPVKPLEQIGGNSCASGPVGKALSDACMGAVASFLTKYQDIILEHQKVIKKNEKRLANLKDIASANGLAFPKITLPPQPHTKEGIEAYNNVVAQIVIWVNLNLWQKLKIGRDEAKPLQRLKGFPSFPLVERQANEVDWWDMVCNVKKLINEKKEDGKVFWQNLAGYKRQEALLPYLSSEEDRKKGKKFARYQFGDLLLHLEKKHGEDWGKVYDEAWERIDKKVEGLSKHIKLEEERRSEDAQSKAALTDWLRAKASFVIEGLKEADKDEFCRCELKLQKWYGDLRGKPFAIEAENSILDISGFSKQYNCAFIWQKDGVKKLNLYLIINYFKGGKLRFKKIKPEAFEANRFYTVINKKSGEIVPMEVNFNFDDPNLIILPLAFGKRQGREFIWNDLLSLETGSLKLANGRVIEKTLYNRRTRQDEPALFVALTFERREVLDSSNIKPMNLIGVDRGENIPAVIALTDPEGCPLSRFKDSLGNPTHILRIGESYKEKQRTIQAAKEVEQRRAGGYSRKYASKAKNLADDMVRNTARDLLYYAVTQDAMLIFENLSRGFGRQGKRTFMAERQYTRMEDWLTAKLAYEGLPSKTYLSKTLAQYTSKTCSNCGFTITSADYDRVLEKLKKTATGWMTTINGKELKVEGQITYYNRYKRQNVVKDLSVELDRLSEESVNNDISSWTKGRSGEALSLLKKRFSHRPVQEKFVCLNCGFETHADEQAALNIARSWLFLRSQEYKKYQTNKTTGNTDKRAFVETWQSFYRKKLKEVWKPAV

SEQ ID NO: 3907 - protein, 977 aa, Artificial Sequence
  CasX Protein Variant
MQEIKRINKIRRRLVKDSNTKKAGKTGPMKTLLVRVMTPDLRERLENLRKKPENIPQPISNTSRANLNKLLTDYTEMKKAILHVYWEEFQKDPVGLMSRVAQPAPKNIDQRKLIPVKDGNERLTSSGFACSQCCQPLYVYKLEQVNDKGKPHTNYFGRCNVSEHERLILLSPHKPEANDELVTYSLGKFGQRALDFYSIHVTRESNHPVKPLEQIGGNSCASGPVGKALSDACMGAVASFLTKYQDIILEHQKVIKKNEKRLANLKDIASANGLAFPKITLPPQPHTKEGIEAYNNVVAQIVIWVNLNLWQKLKIGRDEAKPLQRLKGFPSFPLVERQANEVDWWDMVCNVKKLINEKKEDGKVFWQNLAGYKRQEALLPYLSSEEDRKKGKKFARYQFGDLLLHLEKKHGEDWGKVYDEAWERIDKKVEGLSKHIKLEEERRSEDAQSKAALTDWLRAKASFVIEGLKEADKDEFKRCELKLQKWYGDLRGKPFAIEAENSILDISGFSKQYNCAFIWQKDGVKKLNLYLIINYFKGGKLRFKKIKPEAFEANRFYTVINKKSGEIVPMEVNFNFDDPNLIILPLAFGKRQGREFIWNDLLSLETGSLKLANGRVIEKTLYNRRTRQDEPALFVALTFERREVLDSSNIKPMNLIGIDRGENIPAVIALTDPEGCPLSRFKDSLGNPTHILRIGESYKEKQRTIQAKKEVEQRRAGGYSRKYASKAKNLADDMVRNTVRDLLYYAVTQDAMLIFENLSRGFGRQGKRTFMAERQYTRMEDWLTAKLAYEGLSKTYLSKTLAQYTSKTCSNCGFTITSADYDRVLEKLKKTATGWMTTINGKELKVEGQITYYNRYKRQNVVKDLSVELDRLSEESVNNDISSWTKGRSGEALSLLKKRFSHRPVQEKFVCLNCGFETHADEQAALNIARSWLFLRSQEYKKYQTNKTTGNTDKRAFVETWQSFYRKKLKEVWKPAV

SEQ ID NO: 3908 - protein, 978 aa, Artificial Sequence
  CasX Protein Variant
MQEIKRINKIRRRLVKDSNTKKAGKTGPMKTLLVRVMTPDLRERLENLRKKPENIPQPISNTSRANLNKLLTDYTEMKKAILHVYWEEFQKDPVGLMSRVAQPAPKNIDQRKLIPVKDGNERLTSSGFACSQCCQPLYVYKLEQVNDKGKPHTNYFGRCNVSEHERLILLSPHKPEANDELVTYSLGKFGQRALDFYSIHVTRESNHPVKPLEQIGGNSCASGPVGKALSDACMGAVASFLTKYQDIILEHQKVIKKNEKRLANLKDIASANGLAFPKITLPPQPHTKEGIEAYNNVVAQIVIWVNLNLWQKLKIGRDEAKPLQRLKGFPSFPLVERQANEVDWWDMVCNVKKLINEKKEDGKVFWQNLAGYKRQEALLPYLSSEEDRKKGKKFARYQFGDLLLHLEKKHGEDWGKVYDEAWERIDKKVEGLSKHIKLEEERRSEDAQSKAALTDWLRAKASFVIEGLKEADKDEFCRCELKLQKWYGDLRGKPFAIEAENSILDISGFSKQYNCAFIWQKDGVKKLNLYLIINYFKGGKLRFKKIKPEAFEANRFYTVINKKSGEIVPMEVNFNFDDPNLIILPLAFGKRQGREFIWNDLLSLETGSLKLANGRVIEKTLYNRRTRQDEPALFVALTFERREVLDSSNIKPMNLIGIDRGENIPAVIALTDPEGCPLSRFKDSLGNPTHILRIGESYKEKQRTIQAAKEVEQRRAGGYSRKYASKAKNLADDMVRNTARDLLYYAVTQDAMLIFENLSRGFGRQGKRTFMAERQYTRMEDWLTAKLAYEGLPSKTYLSKTLAQYTSKTCSNCGFTITSADYDRVLEKLKKTATGWMTTINGKELKVEGQITYYNRYKRQNVVKDLSVELDRLSEESVNNDISSWTKGRSGEALSLLKKRFSHRPVQEKFVCLNCGFETHADEQAALNIARMWLFLRSQEYKKYQTNKTTGNTDKRAFVETWQSFYRKKLKEVWKPAV

SEQ ID NO: 3909 - protein, 978 aa, Artificial Sequence
  CasX Protein Variant
MQEIKRINKIRRRLVKDSNTKKAGKTGPMKTLLVRVMTPDLRERLENLRKKPENIPQPISNTSRANLNKLLTDYTEMKKAILHVYWEEFQKDPVGLMSRVAQPAPKNIDQRKLIPVKDGNERLTSSGFACSQCCQPLYVYKLEQVNDKGKPHTNYFGRCNVSEHERLILLSPHKPEANDELVTYSLGKFGQRALDFYSIHVTRESNHPVKPLEQIGGNSCASGPVGKALSDACMGAVASFLTKYQDIILEHQKVIKKNEKRLANLKDIASANGLAFPKITLPPQPHTKEGIEAYNNVVAQIVIWVNLNLWQKLKIGRDEAKPLQRLKGFPSFPLVERQANEVDWWDMVCNVKKLINEKKEDGKVFWQNLAGYKRQEALLPYLSSEEDRKKGKKFARYQFGDLLLHLEKKHGEDWGKVYDEAWERIDKKVEGLSKHIKLEEERRSEDAQSKAALTDWLRAKASFVIEGLKEADKDEFCRCELKLQKWYGDLRGKPFAIEAENSILDISGFSKQYNCAFIWQKDGVKKLNLYLIINYFKGGKLRFKKIKPEAFEANRFYTVINKKSGEIVPMEVNFNFDDPNLIILPLAFGKRQGREFIWNDLLSLETGSLKLANGRVIEKPLYNRRTRQDEPALFVALTFERREVLDSSNIKPMNLIGIDRGENIPAVIALTDPEGCPLSRFKDSLGNPTHILRIGESYKEKQRTIQAAKEVEQRRAGGYSRKYASKAKNLADDMVRNTARDLLYYAVTQDAMLIFENLSRGFGRQGKRTFMAERQYTRMEDWLTAKLAYEGLPSKTYLSKTLAQYTSKTCSNCGFTITSADYDRVLEKLKKTATGWMTTINGKELKVEGQITYYNRYKRQNVVKDLSVELDRLSEESVNNDISSWTKGRSGEALSLLKKRFSHRPVQEKFVCLNCGFETHADEQAALNIARSWLFLRSQEYKKYQTNKTTGNTDKRAFVETWQSFYRKKLKEVWKPAV

SEQ ID NO: 3910 - protein, 978 aa, Artificial Sequence
  CasX Protein Variant
MQEIKRINKIRRRLVKDSNTKKAGKTGPMKTLLVRVMTPDLRERLENLRKKPENIPQPISNTSRANLNKLLTDYTEMKKAILHVYWEEFQKDPVGLMSRVAQPAPKNIDQRKLIPVKDGNERLTSSGFACSQCCQPLYVYKLEQVNDKGKPHTNYFGRCNVSEHERLILLSPHKPEANDELVTYSLGKFGQRALDFYSIHVTRESNHPVKPLEQIGGNSCASGPVGKALSDACMGAVASFLTKYQDIILEHQKVIKKNEKRLANLKDIASANGLAFPKITLPPQPHTKEGIEAYNNVVAQIVIWVNLNLWQKLKIGRDEAKPLQRLKGFPSFPLVERQANEVDWWDMVCNVKKLINEKKEDGKVFWQNLAGYKRQEALLPYLSSPEDRKKGKKFARYQFGDLLLHLEKKHGEDWGKVYDEAWERIDKKVEGLSKHIKLEEERRSEDAQSKAALTDWLRAKASFVIEGLKEADKDEFCRCELKLQKWYGDLRGKPFAIEAENSILDISGFSKQYNCAFIWQKDGVKKLNLYLIINYFKGGKLRFKKIKPEAFEANRFYTVINKKSGEIVPMEVNFNFDDPNLIILPLAFGKRQGREFIWNDLLSLETGSLKLANGRVIEKTLYNRRTRQDEPALFVALTFERREVLDSSNIKPMNLIGIDRGENIPAVIALTDPEGCPLSRFKDSLGNPTHILRIGESYKEKQRTIQAAKEVEQRRAGGYSRKYASKAKNLADDMVRNTARDLLYYAVTQDAMLIFENLSRGFGRQGKRTFMAERQYTRMEDWLTAKLAYEGLPSKTYLSKTLAQYTSKTCSNCGFTITSADYDRVLEKLKKTATGWMTTINGKELKVEGQITYYNRYKRQNVVKDLSVELDRLSEESVNNDISSWTKGRSGEALSLLKKRFSHRPVQEKFVCLNCGFETHADEQAALNIARSWLFLRSQEYKKYQTNKTTGNTDKRAFVETWQSFYRKKLKEVWKPAV

SEQ ID NO: 3911 - protein, 978 aa, Artificial Sequence
  CasX Protein Variant
MQEIKRINKIRRRLVKDSNTKKAGKTGPMKTLLVRVMTPDLRERLENLRKKPENIPQPISNTSRANLNKLLTDYTEMKKAILHVYWEEFQKDPVGLMSRVAQPAPKNIDQRKLIPVKDGNERLTSSGFACSQCCQPLYVYKLEQVNDKGKPHTNYFGRCNVSEHERLILLSPHKPEANDELVTYSLGKFGQRALDFYSIHVTRESNHPVKPLEQIGGNSCASGPVGKALSDACMGAVASFLTKYQDIILEHQKVIKKNEKRLANLKDIASANGLAFPKITLPPQPHTKEGIEAYNNVVAQIVIWVNLNLWQKLKIGRDEAKPLQRLKGFPSFPLVERQANEVDWWDMVCNVKKLINEKKEDGKVFWQNLAGYKRQEALLPYLSSEEDRKKGKKFARYQFGDLLLHLEKKHGEDWGKVYDEAWERIDKKVEGLSKHIKLEEERRSEDAQSKAALTDWLRAKASFVIEGLKEADKDEFCRCELKLQKWYGDLRGKPFAIEAENSILDISGFSKQYNCAFIWQKDGVKKLNLYLIINYFKGGKLRFKKIKPEAFEANRFYTVINKKSGEIVPMEVNFNFDDPNLIILPLAFGKRQGREFIWNDLLSLETGSLKLANGRVIEKTLYNRRTRQDEPALFVALTFERREVLDSSNIKPMNLIGIDRGENIPAVIALTDPEGCPLSRFKDSLGNPTHILRIGESYKEKQRTIQAQKEVEQRRAGGYSRKYASKAKNLADDMVRNTARDLLYYAVTQDAMLIFENLSRGFGRQGKRTFMAERQYTRMEDWLTAKLAYEGLPSKTYLSKTLAQYTSKTCSNCGFTITSADYDRVLEKLKKTATGWMTTINGKELKVEGQITYYNRYKRQNVVKDLSVELDRLSEESVNNDISSWTKGRSGEALSLLKKRFSHRPVQEKFVCLNCGFETHADEQAALNIARSWLFLRSQEYKKYQTNKTTGNTDKRAFVETWQSFYRKKLKEVWKPAV

SEQ ID NO: 3912 - protein, 978 aa, Artificial Sequence
  CasX Protein Variant
MQEIKRINKIRRRLVKDSNTKKAGKTGPMKTLLVRVMTPDLRERLENLRKKPENIPQPISNTSRANLNKLLTDYTEMKKAILHVYWEEFQKDPVGLMSRVAQPAPKNIDQRKLIPVKDGNERLTSSGFACSQCCQPLYVYKLEQVNDKGKPHTNYFGRCNVSEHERLILLSPHKPEANDELVTYSLGKFGQRALDFYSIHVTRESNHPVKPLEQIGGNSCASGPVGKALSDACMGAVASFLTKYQDIILEHQKVIKKNEKRLANLKDIASANGLAFPKITLPPQPHTKEGIEAYNNVVAQIVIWVNKNLWQKLKIGRDEAKPLQRLKGFPSFPLVERQANEVDWWDMVCNVKKLINEKKEDGKVFWQNLAGYKRQEALLPYLSSEEDRKKGKKFARYQFGDLLLHLEKKHGEDWGKVYDEAWERIDKKVEGLSKHIKLEEERRSEDAQSKAALTDWLRAKASFVIEGLKEADKDEFCRCELKLQKWYGDLRGKPFAIEAENSILDISGFSKQYNCAFIWQKDGVKKLNLYLIINYFKGGKLRFKKIKPEAFEANRFYTVINKKSGEIVPMEVNFNFDDPNLIILPLAFGKRQGREFIWNDLLSLETGSLKLANGRVIEKTLYNRRTRQDEPALFVALTFERREVLDSSNIKPMNLIGIDRGENIPAVIALTDPEGCPLSRFKDSLGNPTHILRIGESYKEKQRTIQAAKEVEQRRAGGYSRKYASKAKNLADDMVRNTARDLLYYAVTQDAMLIFENLSRGFGRQGKRTFMAERQYTRMEDWLTAKLAYEGLPSKTYLSKTLAQYTSKTCSNCGFTITSADYDRVLEKLKKTATGWMTTINGKELKVEGQITYYNRYKRQNVVKDLSVELDRLSEESVNNDISSWTKGRSGEALSLLKKRFSHRPVQEKFVCLNCGFETHADEQAALNIARSWLFLRSQEYKKYQTNKTTGNTDKRAFVETWQSFYRKKLKEVWKPAV

SEQ ID NO: 3913 - protein, 977 aa, Artificial Sequence
  CasX Protein Variant
MQEIKRINKIRRRLVKDSNTKKAGKTGPMKTLLVRVMTPDLRERLENLRKKPENIPQPISNTSRANLNKLLTDYTEMKKAILHVYWEEFQKDPVGLMSRVAQPAPKNIDQRKLIPVKDGNERLTSSGFACSQCCQPLYVYKLEQVNDKGKPHTNYFGRCNVSEHERLILLSPHKPEANDELVTYSLGKFGQRALDFYSIHVTRESNHPVKPLEQIGGNSCASGPVGKALSDACMGAVASFLTKYQDIILEHQKVIKKNEKRLANLKDIASANGLAFPKITLPPQPHTKEGIEAYNNVVAQIVIWVNLNLWQKLKIGRDEAKPLQRLKGFPSFPLVERQANEVDWWDMVCNVKKLINEKKEDGKVFWQNLAGYKRQEALRPYLSSEEDRKKGKKFARYQFGDLLLHLEKKHGEDWGKVYDEAWERIDKKVEGLSKHIKLEEERRSEDAQSKAALTDWLRAKASFVIEGLKEADKDEFCRCELKLQKWYGSLRGKPFAIEAENSILDISGFSKQYNCAFIWQKDGVKKLNLYLIINYFKGGKLRFKKIKPEAFEANRFYTVINKKSGEIVPMEVNFNFDDPNLIILPLAFGKRQGREFIWNDLLSLETGSLKLANGRVIEKTLYNRRTRQDEPALFVALTFERREVLDSSNIKPMNLIGIDRGENIPAVIALTDPEGCPLSRFKDSLGNPTHILRIGESYKEKQRTIQAKKEVEQRRAGGYSRKYASKAKNLADDMVRNTARDLLYYAVTQDAMLIFENLSRGFGRQGKRTFMAERQYTRMEDWLTAKLAYEGLSKTYLSKTLAQYTSKTCSNCGFTITSADYDRVLEKLKKTATGWMTTINGKELKVEGQITYYNRYKRQNVVKDLSVELDRLSEESVNNDISSWTKGRSGEALSLLKKRFSHRPVQEKFVCLNCGFETHADEQAALNIARSWLFLRSQEYKKYQTNKTTGNTDKRAFVETWQSFYRKKLKEVWKPAV

SEQ ID NO: 3914 - protein, 978 aa, Artificial Sequence
  CasX Protein Variant
MQEIKRINKIRRRLVKDSNTKKAGKTGPMKTLLVRVMTPDLRERLENLRKKPENIPQPISNTSRANLNKLLTDYTEMKKAILHVYWEEFQKDPVGLMSRVAQPAPKNIDQRKLIPVKDGNERLTSSGFACSQCCQPLYVYKLEQVNDKGKPHTNYFGRCNVSEHERLILLSPHKPEANDELVTYSLGKFGQRALDFYSIHVTRESNHPVKPLEQIGGNSCASGPVGKALSDACMGAVASFLTKYQDIILEHQKVIKKNEKRLANLKDIASANGLAFPKITLPPQPHTKEGIEAYNNVVAQIVIWVNLNLWQKLKIGRDEAKPLQRLKGFPSFPLVERQANEVDWWDMVCNVKKLINEKKEDGKVFWQNLAGYKRQEALLPYLSSEEDRKKGKKFARYQFGDLLLHLEKKHGEDWGKVYDEAWERIDKKVEGLSKHIKLEEERRSEDAQSKAALTDWLRAKASFVIEGLKEADKDEFQRCELKLQKWYGDLRGKPFAIEAENSILDISGFSKQYNCAFIWQKDGVKKLNLYLIINYFKGGKLRFKKIKPEAFEANRFYTVINKKSGEIVPMEVNFNFDDPNLIILPLAFGKRQGREFIWNDLLSLETGSLKLANGRVIEKTLYNRRTRQDEPALFVALTFERREVLDSSNIKPMNLIGIDRGENIPAVIALTDPEGCPLSRFKDSLGNPTHILRIGESYKEKQRTIQAAKEVEQRRAGGYSRKYASKAKNLADDMVRNTARDLLYYAVTQDAMLIFENLSRGFGRQGKRTFMAERQYTRMEDWLTAKLAYEGLPSKTYLSKTLAQYTSKTCSNCGFTITSADYDRVLEKLKKTATGWMTTINGKELKVEGQITYYNRYKRQNVVKDLSVELDRLSEESVNNDISSWTKGRSGEALSLLKKRFSHRPVQEKFVCLNCGFETHADEQAALNIARSWLFLRSQEYKKYQTNKTTGNTDKRAFVETWQSFYRKKLKEVWKPAV

SEQ ID NO: 3915 - protein, 978 aa, Artificial Sequence
  CasX Protein Variant
MQEIKRINKIRRRLVKDSNTKKAGKTGPMKTLLVRVMTPDLRERLENLRKKPENIPQPISNTSRANLNKLLTDYTEMKKAILHVYWEEFQKDPVGLMSRVAQPAPKNIDQRKLIPVKDGNERLTSSGFACSQCCQPLYVYKLEQVNDKGKPHTNYFGRCNVSEHERLILLSPHKPEANDELVTYSLGKFGQRALDFYSIHVTRESNHPVKPLEQIGGNSCASGPVGKALSDACMGAVASFLTKYQDIILEHQKVIKKNEKRLANLKDIASANGLAFPKITLPPQPHTKEGIEAYNNVVAQIVIWVNLNLWQKLKIGRDEAKPLQRLKGFPSFPLVERQANEVDWWDMVCNVKKLINEKKEDGKVFWQNLAGYKRQEALLPYLSSEEDRKKGKKFARYQFGDLLLHLEKKHGEDWGKVYDEAWERIDKKVEGLSKHIKLEEERRSEDAQSKAALTDWLRAKASFVIEGLKEADKDEFCRCELKLQKWYGDLRGKPFAIEAENSILDISGFSKQYNCAFIWQKDGVKKLNLYLIINYFKGGKLRFKKIKPEAFEANRFYTVINKKSGEIVPMEVNFNFDDPNLIILPLAFGKRQGREFIWNDLLSLETGSLKLANGRVIEKTLYNRRTRQDEPALFVALTFERREVLDSSNIKPMNLIGIDRGENIPAVIALTDPEGCPLSRFKDSLGNPTHILRIGESYKEKQRTIQAAKEVEQRRAGGYSRKYASKAKNLADDMVRNTARDLLYYAVTQDAMLIFENLSRGFGRQGKRTFMAERQYTRMEDWLTAKLAYEGLPSKTYLSKTLAAYTSKTCSNCGFTITSADYDRVLEKLKKTATGWMTTINGKELKVEGQITYYNRYKRQNVVKDLSVELDRLSEESVNNDISSWTKGRSGEALSLLKKRFSHRPVQEKFVCLNCGFETHADEQAALNIARSWLFLRSQEYKKYQTNKTTGNTDKRAFVETWQSFYRKKLKEVWKPAV

SEQ ID NO: 3916 - protein, 978 aa, Artificial Sequence
  CasX Protein Variant
MQEIKRINKIRRRLVKDSNTKKAGKTGPMKTLLVRVMTPDLRERLENLRKKPENIPQPISNTSRANLNKLLTDYTEMKKAILHVYWEEFQKDPVGLMSRVAQPAPKNIDQRKLIPVKDGNERLTSSGFACSQCCQPLYVYKLEQVNDKGKPHTNYFGRCNVSEHERLILLSPHKPEANDELVTYSLGKFGQRALDFYSIHVTRESNHPVKPLEQIGGNSCASGPVGKALSDACMGAVASFLTKYQDIILEHQKVIKKNEKRLANLKDIASANGLAFPKITLPPQPHTKEGIEAYNNVVAQIVIWVNLNLWQKLKIGRDEAKPLQRLKGFPSFPLVERQANEVDWWDMVCNVKKLINEKKEDGKVFWQNLAGYKRQEALLPYLSSEEDRKKGKKFARYQLGDLLLHLEKKHGEDWGKVYDEAWERIDKKVEGLSKHIKLEEERRSEDAQSKAALTDWLRAKASFVIEGLKEADKDEFCRCELKLQKWYGDLRGKPFAIEAENSILDISGFSKQYNCAFIWQKDGVKKLNLYLIINYFKGGKLRFKKIKPEAFEANRFYTVINKKSGEIVPMEVNFNFDDPNLIILPLAFGKRQGREFIWNDLLSLETGSLKLANGRVIEKTLYNRRTRQDEPALFVALTFERREVLDSSNIKPMNLIGIDRGENIPAVIALTDPEGCPLSRFKDSLGNPTHILRIGESYKEKQRTIQAAKEVEQRRAGGYSRKYASKAKNLADDMVRNTARDLLYYAVTQDAMLIFENLSRGFGRQGKRTFMAERQYTRMEDWLTAKLAYEGLPSKTYLSKTLAQYTSKTCSNCGFTITSADYDRVLEKLKKTATGWMTTINGKELKVEGQITYYNRYKRQNVVKDLSVELDRLSEESVNNDISSWTKGRSGEALSLLKKRFSHRPVQEKFVCLNCGFETHADEQAALNIARSWLFLRSQEYKKYQTNKTTGNTDKRAFVETWQSFYRKKLKEVWKPAV

SEQ ID NO: 3917 - protein, 977 aa, Artificial Sequence
  CasX Protein Variant
MQEIKRINKIRRRLVKDSNTKKAGKTGPMKTLLVRVMTPDLRERLENLRKKPENIPQPISNTSRANLNKLLTDYTEMKKAILHVYWEEFQKDPVGLMSRVAQPAPKNIDQRKLIPVKDGNERLTSSGFACSQCCQPLYVYKLEQVNDKGKPHTNYFGRCNVSEHERLILLSPHKPEANDELVTYSLGKFGQRALDFYSIHVTRESNHPVKPLEQIGGNSCASGPVGKALSDACMGAVASFLTKYQDIILEHQKVIKKNEKRLANLKDIASANGLAFPKITLPPQPHTKEGIEAYNNVVAQIVIWVNLNLWQKLKIGRDEAKPLQRLKGFPSFPLVERQANEVDWWDMVCNVKKLINEKKEDGKVFWQNLAGYKRQEALRPYLSSEEDRKKGKKFARYQFGDLLLHLEKKHGEDWGKVYDEAWERIDKKVEGLSKHIKLEEERRSEDAQSKAALTDWLRAKASFVIEGLKEADKDEFCRCELKLQKWYGDLRGKPFAIEAENSILDISGFSKQYNCAFIWQKDGVKKLNLYLIINYFKGGKLRFKKIKPEAFEANRFYTVINKKSGEIVPMEVNFNFDDPNLIILPLAFGKRQGREFIWNDLLSLETGSLKLANGRVIEKTLYNRRTRQDEPALFVALTFERREVLDSSNIKPMNLIGIDRGENIPAVIALTDPEGCPLSRFKDSLGNPTHILRIGESYKEKQRTIQAKKEVEQRRAGGYSRKYASKAKNLADDMVRNTARDLLYYAVTQDAMLIFENLSRGFGRQGKRTFMAERQYTRMEDWLTAKLAYEGLSKTLLSKTLAQYTSKTCSNCGFTITSADYDRVLEKLKKTATGWMTTINGKELKVEGQITYYNRYKRQNVVKDLSVELDRLSEESVNNDISSWTKGRSGEALSLLKKRFSHRPVQEKFVCLNCGFETHADEQAALNIARSWLFLRSQEYKKYQTNKTTGNTDKRAFVETWQSFYRKKLKEVWKPAV

SEQ ID NO: 3918 - protein, 977 aa, Artificial Sequence
  CasX Protein Variant
MQEIKRINKIRRRLVKDSNTKKAGKTGPMKTLLVRVMTPDLRERLENLRKKPENIPQPISNTSRANLNKLLTDYTEMKKAILHVYWEEFQKDPVGLMSRVAQPAPKNIDQRKLIPVKDGNERLTSSGFACSQCCQPLYVYKLEQVNDKGKPHTNYFGRCNVSEHERLILLSPHKPEANDELVTYSLGKFGQRALDFYSIHVTRESNHPVKPLEQIGGNSCASGPVGKALSDACMGAVASFLTKYQDIILEHQKVIKKNEKRLANLKDIASANGLAFPKITLPPQPHTKEGIEAYNNVVAQIVIWVNLNLWQKLKIGRDEAKPLQRLKGFPSFPLVERQANEVDWWDMVCNVKKLINEKKEDGKVFWQNLAGYKRQEALRPYLSSEEDRKKGKKFARYQFGDLLLHLEKKHGEDWGKVYDEAWERIDKKVEGLSKHIKLEEERRSEDAQSKAALTDWLRAKASFVIEGLKEADKDEFKRCELKLQKWYGDLRGKPFAIEAENSILDISGFSKQYNCAFIWQKDGVKKLNLYLIINYFKGGKLRFKKIKPEAFEANRFYTVINKKSGEIVPMEVNFNFDDPNLIILPLAFGKRQGREFIWNDLLSLETGSLKLANGRVIEKTLYNRRTRQDEPALFVALTFERREVLDSSNIKPMNLIGIDRGENIPAVIALTDPEGCPLSRFKDSLGNPTHILRIGESYKEKQRTIQAKKEVEQRRAGGYSRKYASKAKNLADDMVRNTARDLLYYAVTQDAMLIFENLSRGFGRQGKRTFMAERQYTRMEDWLTAKLAYEMLSKTYLSKTLAQYTSKTCSNCGFTITSADYDRVLEKLKKTATGWMTTINGKELKVEGQITYYNRYKRQNVVKDLSVELDRLSEESVNNDISSWTKGRSGEALSLLKKRFSHRPVQEKFVCLNCGFETHADEQAALNIARSWLFLRSQEYKKYQTNKTTGNTDKRAFVETWQSFYRKKLKEVWKPAV

SEQ ID NO: 3919 - protein, 978 aa, Artificial Sequence
  CasX Protein Variant
MQEIKRINKIRRRLVKDSNTKKAGKTGPMKTLLVRVMTPDLRERLENLRKKPENIPQPISNTSRANLNKLLTDYTEMKKAILHVYWEEFQKDPVGLMSRVAQPAPKNIDQRKLIPVKDGNERLTSSGFACSQCCQPLYVYKLEQVNDKGKPHTNYFGRCNVSEHERLILLSPHKPEANDELVTYSLGKFGQRALDFYSIHVTRESNHPVKPLEQIGGNSCASGPVGKALSDACMGAVASFLTKYQDIILEHQKVIKKNEKRLANLKDIASANGLAFPKITLPPQPHTKEGIEAYNNVVAQIVIWVNLNLWQKLKIGRDEAKPLQRLKGFPSFPLVERQANEVDWWDMVCNVKKLINEKKEDGKVFWQNLAGYKRQEALLPYLSSEEDRKKGKKFARYQFGDLLLHLEKKHGEDWGKVYDEAWERIDKKVEGLSKHIKLEEERRSEDAQSKAALTDWLRAKASFVIEGLKEADKDEFCRCELKLQKWYGDLRGKPFAIEAENSILDISGFSKQYNCAFIWQKDGVKKLNLYLIINYFKGGKLRFKKIKPEAFEANRFYTVINKKSGEIVPMEVNFNFDDPNLIILPLAFGKRQGREFIWNDLLSLETGSLKLANGRVIEKTLYNRRTRQDEPALFVALTFERREVLDSSNIKPMNLIGIDRGENIPAVIALTDPEGCPLSRFKDSLGNPTHILRIGESYKEKQRTIQAAKEVEQRRAGGYSRKYASKAKNLADTMVRNTARDLLYYAVTQDAMLIFENLSRGFGRQGKRTFMAERQYTRMEDWLTAKLAYEGLPSKTYLSKTLAQYTSKTCSNCGFTITSADYDRVLEKLKKTATGWMTTINGKELKVEGQITYYNRYKRQNVVKDLSVELDRLSEESVNNDISSWTKGRSGEALSLLKKRFSHRPVQEKFVCLNCGFETHADEQAALNIARSWLFLRSQEYKKYQTNKTTGNTDKRAFVETWQSFYRKKLKEVWKPAV

SEQ ID NO: 3920 - protein, 978 aa, Artificial Sequence
  CasX Protein Variant
MQEIKRINKIRRRLVKDSNTKKAGKTGPMKTLLVRVMTPDLRERLENLRKKPENIPQPISNTSRANLNKLLTDYTEMKKAILHVYWEEFQKDPVGLMSRVAQPAPKNIDQRKLIPVKDGNERLTSSGFACSQCCQPLYVYKLEQVNDKGKPHTNYFGRCNVSEHERLILLSPHKPEANDELVTYSLGKFGQRALDFYSIHVTRESNHPVKPLEQIGGNSCASGPVGKALSDACMGAVASFLTKYQDIILEHQKVIKKNEKRLANLKDIASANGLAFPKITLPPQPHTKEGIEAYNNVVAQIVIWVNLNLWQKLKIGRDEAKPLQRLKGFPSFPLVERQANEVDWWDMVCNVKKLINEKKEDGKVFWQNLAGYKRQEALLPYLSSEEDRKKGKKFARYQFGDLLLHLEKKHGEDWGKVYDEAWERIDKKVEGLSKHIKLEEERRSEDAQSKAALTDWLRAKASFVIEGLKEADKDEFCRCELKLQKWYGDLRGKPFAIEAENSILDISGFSKQYNCAFIWQKDGVKKLNLYLIINYFKGGKLRFKKIKPEAFEANRFYTVINKKSGEIVPMEVNFNFDDPNLIILPLAFGKRQGREFIWNDLLSLETGSLKLANGRVIEKTLYNRRTRQDEPALFVALTFERREVLDSSNIKPMNLIGIDRGENIPAVIALTDPEGCPLSRFKDSLGNPTHILRIGESYKEKQRTIQAAKEVEQRRAGGYSRKYASKAKNLADDMVRNTARDLLYYAVTQDAMLIFENLSRGFGRQGKRTFMAERQYTRMEDWLTAKLAYEGLQSKTYLSKTLAQYTSKTCSNCGFTITSADYDRVLEKLKKTATGWMTTINGKELKVEGQITYYNRYKRQNVVKDLSVELDRLSEESVNNDISSWTKGRSGEALSLLKKRFSHRPVQEKFVCLNCGFETHADEQAALNIARSWLFLRSQEYKKYQTNKTTGNTDKRAFVETWQSFYRKKLKEVWKPAV

SEQ ID NO: 3921 - protein, 978 aa, Artificial Sequence
  CasX Protein Variant
MQEIKRINKIRRRLVKDSNTKKAGKTGPMKTLLVRVMTPDLRERLENLRKKPENIPQPISNTSRANLNKLLTDYTEMKKAILHVYWEEFQKDPVGLMSRVAQPAPKNIDQRKLIPVKDGNERLTSSGFACSQCCQPLYVYKLEQVNDKGKPHTNYFGRCNVSEHERLILLSPHKPEANDELVTYSLGKFGQRALDFYSIHVTRESNHPVKPLEQIGGNSCASGPVGKALSDACMGAVASFLTKYQDIILEHQKVIKKNEKRLANLKDIASANGLAFPKITLPPQPHTKEGIEAYNNVVAQIVIWVNLNLWQKLKIGRDEAKPLQRLKGFPSFPLVERQANEVDWWDMVCNVKKLINEKKEDGKVFWQNLAGYKRQEALLPYLSSEEDRKKGKKFARYQFGDLLLHLEKKHGEDWGKVYDEAWERIDKKVEGLSKHIKLEEERRSEDAQSKAALTDWLRAKASFVIEGLKEADKDEFCRCELKLQKWYGDLRGKPFAIEAENSILDISGFSKQYNCAFIWQKDGVKKLNLYLIINYFKGGKLRFKKIKPEAFEANRFYTVINKKSGEIVPMEVNFNFDDPNLIILPLAFGKRQGREFIWNDLLSLETGSLKLANGRVIEKTLYNRRTRQDEPALFVALTFERREVLDSSNIKPMNLIGIDRGENIPAVIALTDPEGCPLSRFKDSLGNPTHILRIGESYKEKQRTIQAAKEVEQRRAGGYSRKYASKAKNLADDMVRNTVRDLLYYAVTQDAMLIFENLSRGFGRQGKRTFMAERQYTRMEDWLTAKLAYEGLPSKTYLSKTLAQYTSKTCSNCGFTITSADYDRVLEKLKKTATGWMTTINGKELKVEGQITYYNRYKRQNVVKDLSVELDRLSEESVNNDISSWTKGRSGEALSLLKKRFSHRPVQEKFVCLNCGFETHADEQAALNIARSWLFLRSQEYKKYQTNKTTGNTDKRAFVETWQSFYRKKLKEVWKPAV

SEQ ID NO: 3922 - protein, 978 aa, Artificial Sequence
  CasX Protein Variant
MQEIKRINKIRRRLVKDSNTKKAGKTGPMKTLLVRVMTPDLRERLENLRKKPENIPQPISNTSRANLNKLLTDYTEMKKAILHVYWEEFQKDPVGLMSRVAQPAPKNIDQRKLIPVKDGNERLTSSGFACSQCCQPLYVYKLEQVNDKGKPHTNYFGRCNVSEHERLILLSPHKPEANDELVTYSLGKFGQRALDFYSIHVTRESNHPVKPLEQIGGNSCASGPVGKALSDACMGAVASFLTKYQDIILEHQKVIKKNEKRLANLKDIASANGLAFPKITLPPQPHTKEGIEAYNNVVAQIVIWVNLNLWQKLKIGRDEAKPLQRLKGFPSFPLVERQANEVDWWDMVCNVKKLINEKKEDGKVFWQNLAGYKRQEALLPYLSSESDRKKGKKFARYQFGDLLLHLEKKHGEDWGKVYDEAWERIDKKVEGLSKHIKLEEERRSEDAQSKAALTDWLRAKASFVIEGLKEADKDEFCRCELKLQKWYGDLRGKPFAIEAENSILDISGFSKQYNCAFIWQKDGVKKLNLYLIINYFKGGKLRFKKIKPEAFEANRFYTVINKKSGEIVPMEVNFNFDDPNLIILPLAFGKRQGREFIWNDLLSLETGSLKLANGRVIEKTLYNRRTRQDEPALFVALTFERREVLDSSNIKPMNLIGIDRGENIPAVIALTDPEGCPLSRFKDSLGNPTHILRIGESYKEKQRTIQAAKEVEQRRAGGYSRKYASKAKNLADDMVRNTARDLLYYAVTQDAMLIFENLSRGFGRQGKRTFMAERQYTRMEDWLTAKLAYEGLPSKTYLSKTLAQYTSKTCSNCGFTITSADYDRVLEKLKKTATGWMTTINGKELKVEGQITYYNRYKRQNVVKDLSVELDRLSEESVNNDISSWTKGRSGEALSLLKKRFSHRPVQEKFVCLNCGFETHADEQAALNIARSWLFLRSQEYKKYQTNKTTGNTDKRAFVETWQSFYRKKLKEVWKPAV

SEQ ID NO: 3923 - protein, 978 aa, Artificial Sequence
  CasX Protein Variant
MQEIKRINKIRRRLVKDSNTKKAGKTGPMKTLLVRVMTPDLRERLENLRKKPENIPQPISNTSRANLNKLLTDYTEMKKAILHVYWEEFQKDPVGLMSRVAQPAPKNIDQRKLIPVKDGNERLTSSGFACSQCCQPLYVYKLEQVNDKGKPHTNYFGRCNVSEHERLILLSPHKPEANDELVTYSLGKFGQRALDFYSIHVTRESNHPVKPLEQIGGNSCASGPVGKALSDACMGAVASFLTKYQDIILEHQKVIKKNEKRLANLKDIASANGLAFPKITLPPQPHTKEGIEAYNNVVAQIVIWVNLNLWQKLKIGRDEAKPLQRLKGFPSFPLVERQANEVDWWDMVCNVKKLINEKKEDGKVFWQNLAGYKRQEALLPYLSSEEDRKKGKKFARYQFGDLLLHLEKKHGEDWGKVYDEAWERIDKKVEGLSKHIKLEEERRSEDAQSKAALTDWLRAKASFVIEGLKEADKDEFCRCELKLQKWYGDLRGKPFAIEAENSILDISGFSKQYNCAFIWQKDGVKKLNLYLIINYSKGGKLRFKKIKPEAFEANRFYTVINKKSGEIVPMEVNFNFDDPNLIILPLAFGKRQGREFIWNDLLSLETGSLKLANGRVIEKTLYNRRTRQDEPALFVALTFERREVLDSSNIKPMNLIGIDRGENIPAVIALTDPEGCPLSRFKDSLGNPTHILRIGESYKEKQRTIQAAKEVEQRRAGGYSRKYASKAKNLADDMVRNTARDLLYYAVTQDAMLIFENLSRGFGRQGKRTFMAERQYTRMEDWLTAKLAYEGLPSKTYLSKTLAQYTSKTCSNCGFTITSADYDRVLEKLKKTATGWMTTINGKELKVEGQITYYNRYKRQNVVKDLSVELDRLSEESVNNDISSWTKGRSGEALSLLKKRFSHRPVQEKFVCLNCGFETHADEQAALNIARSWLFLRSQEYKKYQTNKTTGNTDKRAFVETWQSFYRKKLKEVWKPAV

SEQ ID NO: 3924 - protein, 978 aa, Artificial Sequence
  CasX Protein Variant
MQEIKRINKIRRRLVKDSNTKKAGKTGPMKTLLVRVMTPDLRERLENLRKKPENIPQPISNTSRANLNKLLTDYTEMKKAILHVYWEEFQKDPVGLMSRVAQPAPKNIDQRKLIPVKDGNERLTSSGFACSQCCQPLYVYKLEQVNDKGKPHTNYFGRCNVSEHERLILLSPHKPEANDELVTYSLGKFGQRALDFYSIHVTRESNHPVKPLEQIGGNSCASGPVGKALSDACMGAVASFLTKYQDIILEHQKVIKKNEKRLANLKDIASANGLAFPKITLPPQPHTKEGIEAYNNVVAQIVIWVNLNLWQKLKIGRDEAKPLQRLKGFPSFPLVERQANEVDWWDMVCNVKKLINEKKEDGKVFWQNLAGYKRQEALLPYLSSEEKRKKGKKFARYQFGDLLLHLEKKHGEDWGKVYDEAWERIDKKVEGLSKHIKLEEERRSEDAQSKAALTDWLRAKASFVIEGLKEADKDEFCRCELKLQKWYGDLRGKPFAIEAENSILDISGFSKQYNCAFIWQKDGVKKLNLYLIINYFKGGKLRFKKIKPEAFEANRFYTVINKKSGEIVPMEVNFNFDDPNLIILPLAFGKRQGREFIWNDLLSLETGSLKLANGRVIEKTLYNRRTRQDEPALFVALTFERREVLDSSNIKPMNLIGIDRGENIPAVIALTDPEGCPLSRFKDSLGNPTHILRIGESYKEKQRTIQAAKEVEQRRAGGYSRKYASKAKNLADDMVRNTARDLLYYAVTQDAMLIFENLSRGFGRQGKRTFMAERQYTRMEDWLTAKLAYEGLPSKTYLSKTLAQYTSKTCSNCGFTITSADYDRVLEKLKKTATGWMTTINGKELKVEGQITYYNRYKRQNVVKDLSVELDRLSEESVNNDISSWTKGRSGEALSLLKKRFSHRPVQEKFVCLNCGFETHADEQAALNIARSWLFLRSQEYKKYQTNKTTGNTDKRAFVETWQSFYRKKLKEVWKPAV

SEQ ID NO: 3925 - protein, 978 aa, Artificial Sequence
  CasX Protein Variant
MQEIKRINKIRRRLVKDSNTKKAGKTGPMKTLLVRVMTPDLRERLENLRKKPENIPQPISNTSRANLNKLLTDYTEMKKAILHVYWEEFQKDPVGLMSRVAQPAPKNIDQRKLIPVKDGNERLTSSGFACSQCCQPLYVYKLEQVNDKGKPHTNYFGRCNVSEHERLILLSPHKPEANDELVTYSLGKFGQRALDFYSIHVTRESNHPVKPLEQIGGNSCASGPVGKALSDACMGAVASFLTKYQDIILEHQKVIKKNEKRLANLKDIASANGLAFPKITLPPQPHTKEGIEAYNNVVAQIVIWVNLNLWQKLKIGRDEAKPLQRLKGFPSFPLVERQANEVDWWDMVCNVKKLINEKKEDGKVFWQNLAGYKRQEALLPYLSSENDRKKGKKFARYQFGDLLLHLEKKHGEDWGKVYDEAWERIDKKVEGLSKHIKLEEERRSEDAQSKAALTDWLRAKASFVIEGLKEADKDEFCRCELKLQKWYGDLRGKPFAIEAENSILDISGFSKQYNCAFIWQKDGVKKLNLYLIINYFKGGKLRFKKIKPEAFEANRFYTVINKKSGEIVPMEVNFNFDDPNLIILPLAFGKRQGREFIWNDLLSLETGSLKLANGRVIEKTLYNRRTRQDEPALFVALTFERREVLDSSNIKPMNLIGIDRGENIPAVIALTDPEGCPLSRFKDSLGNPTHILRIGESYKEKQRTIQAAKEVEQRRAGGYSRKYASKAKNLADDMVRNTARDLLYYAVTQDAMLIFENLSRGFGRQGKRTFMAERQYTRMEDWLTAKLAYEGLPSKTYLSKTLAQYTSKTCSNCGFTITSADYDRVLEKLKKTATGWMTTINGKELKVEGQITYYNRYKRQNVVKDLSVELDRLSEESVNNDISSWTKGRSGEALSLLKKRFSHRPVQEKFVCLNCGFETHADEQAALNIARSWLFLRSQEYKKYQTNKTTGNTDKRAFVETWQSFYRKKLKEVWKPAV

SEQ ID NO: 3926 - protein, 978 aa, Artificial Sequence
  CasX Protein Variant
MQEIKRINKIRRRLVKDSNTKKAGKTGPMKTLLVRVMTPDLRERLENLRKKPENIPQPISNTSRANLNKLLTDYTEMKKAILHVYWEEFQKDPVGLMSRVAQPAPKNIDQRKLIPVKDGNERLTSSGFACSQCCQPLYVYKLEQVNDKGKPHTNYFGRCNVSEHERLILLSPHKPEANDELVTYSLGKFGQRALDFYSIHVTRESNHPVKPLEQIGGNSCASGPVGKALSDACMGAVASFLTKYQDIILEHQKVIKKNEKRLANLKDIASANGLAFPKITLPPQPHTKEGIEAYNNVVAQIVIWVNLNLWQKLKIGRDEAKPLQRLKGFPSFPLVERQANEVDWWDMVCNVKKLINEKKEDGKVFWQNLAGYKRQEALLPYLSSEEDRKKGKKFARYQFGDLLLHLEKKHGEDWGKVYDEAWERIDKKVEGLSKHIKLEEERRSEDAQSKAALTDWLRAKASFVIEGLKEADKDEFKRCELKLQKWYGDLRGKPFAIEAENSILDISGFSKQYNCAFIWQKDGVKKLNLYLIINYFKGGKLRFKKIKPEAFEANRFYTVINKKSGEIVPMEVNFNFDDPNLIILPLAFGKRQGREFIWNDLLSLETGSLKLANGRVIEKTLYNRRTRQDEPALFVALTFERREVLDSSNIKPMNLIGIDRGENIPAVIALTDPEGCPLSRFKDSLGNPTHILRIGESYKEKQRTIQAAKEVEQRRAGGYSRKYASKAKNLADDMVRNTARDLLYYAVTQDAMLIFENLSRGFGRQGKRTFMAERQYTRMEDWLTAKLAYEGLPSKTYLSKTLAQYTSKTCSNCGFTITSADYDRVLEKLKKTATGWMTTINGKELKVEGQITYYNRYKRQNVVKDLSVELDRLSEESVNNDISSWTKGRSGEALSLLKKRFSHRPVQEKFVCLNCGFETHADEQAALNIARSWLFLRSQEYKKYQTNKTTGNTDKRAFVETWQSFYRKKLKEVWKPAV

SEQ ID NO: 3927 - protein, 978 aa, Artificial Sequence
  CasX Protein Variant
MQEIKRINKIRRRLVKDSNTKKAGKTGPMKTLLVRVMTPDLRERLENLRKKPENIPQPISNTSRANLNKLLTDYTEMKKAILHVYWEEFQKDPVGLMSRVAQPAPKNIDQRKLIPVKDGNERLTSSGFACSQCCQPLYVYKLEQVNDKGKPHTNYFGRCNVSEHERLILLSPHKPEANDELVTYSLGKFGQRALDFYSIHVTRESNHPVKPLEQIGGNSCASGPVGKALSDACMGAVASFLTKYQDIILEHQKVIKKNEKRLANLKDIASANGLAFPKITLPPQPHTKEGIEAYNNVVAQIVIWVNLNLWQKLKIGRDEAKPLQRLKGFPSFPLVERQANEVDWWDMVCNVKKLINEKKEDGKVFWQNLAGYKRQEALLPYLSSEEDRKKGKKFARYQFGDLLLHLEKKHGEDWGKVYDEAWERIDKKVEGLSKHIKLEEERRSEDAQSKAALTDWLRAKASFVIEGLKEADKDEFRRCELKLQKWYGDLRGKPFAIEAENSILDISGFSKQYNCAFIWQKDGVKKLNLYLIINYFKGGKLRFKKIKPEAFEANRFYTVINKKSGEIVPMEVNFNFDDPNLIILPLAFGKRQGREFIWNDLLSLETGSLKLANGRVIEKTLYNRRTRQDEPALFVALTFERREVLDSSNIKPMNLIGIDRGENIPAVIALTDPEGCPLSRFKDSLGNPTHILRIGESYKEKQRTIQAAKEVEQRRAGGYSRKYASKAKNLADDMVRNTARDLLYYAVTQDAMLIFENLSRGFGRQGKRTFMAERQYTRMEDWLTAKLAYEGLPSKTYLSKTLAQYTSKTCSNCGFTITSADYDRVLEKLKKTATGWMTTINGKELKVEGQITYYNRYKRQNVVKDLSVELDRLSEESVNNDISSWTKGRSGEALSLLKKRFSHRPVQEKFVCLNCGFETHADEQAALNIARSWLFLRSQEYKKYQTNKTTGNTDKRAFVETWQSFYRKKLKEVWKPAV

SEQ ID NO: 3928 - protein, 978 aa, Artificial Sequence
  CasX Protein Variant
MQEIKRINKIRRRLVKDSNTKKAGKTGPMKTLLVRVMTPDLRERLENLRKKPENIPQPISNTSRANLNKLLTDYTEMKKAILHVYWEEFQKDPVGLMSRVAQPAPKNIDQRKLIPVKDGNERLTSSGFACSQCCQPLYVYKLEQVNDKGKPHTNYFGRCNVSEHERLILLSPHKPEANDELVTYSLGKFGQRALDFYSIHVTRESNHPVKPLEQIGGNSCASGPVGKALSDACMGAVASFLTKYQDIILEHQKVIKKNEKRLANLKDIASANGLAFPKITLPPQPHTKEGIEAYNNVVAQIVIWVNLNLWQKLKIGRDEAKPLQRLKGFPSFPLVERQANEVDWWDMVCNVKKLINEKKEDGKVFWQNLAGYKRQEALLPYLSSEEDRKKGKKFARYQFGDLLLHLEKKHGEDWGKVYDEAWERIDKKVEGLSKHIKLEEERRSEDAQSKAALTDWLRAKASFVIEGLKEADKDEFCRCELKLQKWYGDLRGKPFAIEAENSILDISGFSKQYNCAFIWQKDGVKKLNLYLIINYFKGGKLRFKKIKPEAFEANRFYTVINKKSGEIVPMEVNFNFDDPNLIILPLAFGKRQGREFIWNDLLSLETGSLKLANGRVIEKTLYNRRTRQDEPALFVALTFERREVLDSSNIKPMNLIGIDRGENIPAVIALTDPEGCPLSRFKDSLGNPTHILRIGESYKEKQRTIQAAKEVEQRRAGGYSRKYASKAKNLADDMVRNTTRDLLYYAVTQDAMLIFENLSRGFGRQGKRTFMAERQYTRMEDWLTAKLAYEGLPSKTYLSKTLAQYTSKTCSNCGFTITSADYDRVLEKLKKTATGWMTTINGKELKVEGQITYYNRYKRQNVVKDLSVELDRLSEESVNNDISSWTKGRSGEALSLLKKRFSHRPVQEKFVCLNCGFETHADEQAALNIARSWLFLRSQEYKKYQTNKTTGNTDKRAFVETWQSFYRKKLKEVWKPAV

SEQ ID NO: 3929 - protein, 978 aa, Artificial Sequence
  CasX Protein Variant
MQEIKRINKIRRRLVKDSNTKKAGKTGPMKTLLVRVMTPDLRERLENLRKKPENIPQPISNTSRANLNKLLTDYTEMKKAILHVYWEEFQKDPVGLMSRVAQPAPKNIDQRKLIPVKDGNERLTSSGFACSQCCQPLYVYKLEQVNDKGKPHTNYFGRCNVSEHERLILLSPHKPEANDELVTYSLGKFGQRALDFYSIHVTRESNHPVKPLEQIGGNRCASGPVGKALSDACMGAVASFLTKYQDIILEHQKVIKKNEKRLANLKDIASANGLAFPKITLPPQPHTKEGIEAYNNVVAQIVIWVNLNLWQKLKIGRDEAKPLQRLKGFPSFPLVERQANEVDWWDMVCNVKKLINEKKEDGKVFWQNLAGYKRQEALLPYLSSEEDRKKGKKFARYQFGDLLLHLEKKHGEDWGKVYDEAWERIDKKVEGLSKHIKLEEERRSEDAQSKAALTDWLRAKASFVIEGLKEADKDEFCRCELKLQKWYGDLRGKPFAIEAENSILDISGFSKQYNCAFIWQKDGVKKLNLYLIINYFKGGKLRFKKIKPEAFEANRFYTVINKKSGEIVPMEVNFNFDDPNLIILPLAFGKRQGREFIWNDLLSLETGSLKLANGRVIEKTLYNRRTRQDEPALFVALTFERREVLDSSNIKPMNLIGIDRGENIPAVIALTDPEGCPLSRFKDSLGNPTHILRIGESYKEKQRTIQAAKEVEQRRAGGYSRKYASKAKNLADDMVRNTARDLLYYAVTQDAMLIFENLSRGFGRQGKRTFMAERQYTRMEDWLTAKLAYEGLPSKTYLSKTLAQYTSKTCSNCGFTITSADYDRVLEKLKKTATGWMTTINGKELKVEGQITYYNRYKRQNVVKDLSVELDRLSEESVNNDISSWTKGRSGEALSLLKKRFSHRPVQEKFVCLNCGFETHADEQAALNIARSWLFLRSQEYKKYQTNKTTGNTDKRAFVETWQSFYRKKLKEVWKPAV

SEQ ID NO: 3930 - protein, 978 aa, Artificial Sequence
  CasX Protein Variant
MQEIKRINKIRRRLVKDSNTKKAGKTGPMKTLLVRVMTPDLRERLENLRKKPENIPQPISNTSRANLNKLLTDYTEMKKAILHVYWEEFQKDPVGLMSRVAQPAPKNIDQRKLIPVKDGNERLTSSGFACSQCCQPLYVYKLEQVNDKGKPHTNYFGRCNVSEHERLILLSPHKPEANDELVTYSLGKFGQRALDFYSIHVTRESNHPVKPLEQIGGNSCASGPVGKALSDACMGAVASFLTKYQDIILEHQKVIKKNEKRLANLKDIASANGLAFPKITLPPQPHTKEGIEAYNNVVAQIVIWVNLNLWQKLKIGRDEAKPLQRLKGFPSFPLVERQANEVDWWDMVCNVKKLINEKKEDGKVFWQNLAGYKRQEALLPYLSSEEDRKKGKKFARYQFGDLLLHLEKKHGEDWGEVYDEAWERIDKKVEGLSKHIKLEEERRSEDAQSKAALTDWLRAKASFVIEGLKEADKDEFCRCELKLQKWYGDLRGKPFAIEAENSILDISGFSKQYNCAFIWQKDGVKKLNLYLIINYFKGGKLRFKKIKPEAFEANRFYTVINKKSGEIVPMEVNFNFDDPNLIILPLAFGKRQGREFIWNDLLSLETGSLKLANGRVIEKTLYNRRTRQDEPALFVALTFERREVLDSSNIKPMNLIGIDRGENIPAVIALTDPEGCPLSRFKDSLGNPTHILRIGESYKEKQRTIQAKKEVEQRRAGGYSRKYASKAKNLADDMVRNTARDLLYYAVTQDAMLIFENLSRGFGRQGKRTFMAERQYTRMEDWLTAKLAYEGLPSKTYLSKTLAQYTSKTCSNCGFTITSADYDRVLEKLKKTATGWMTTINGKELKVEGQITYYNRYKRQNVVKDLSVELDRLSEESVNNDISSWTKGRSGEALSLLKKRFSHRPVQEKFVCLNCGFETHADEQAALNIARSWLFLRSQEYKKYQTNKTTGNTDKRAFVETWQSFYRKKLKEVWKPAV

SEQ ID NO: 3931 - protein, 978 aa, Artificial Sequence
  CasX Protein Variant
MQEIKRINKIRRRLVKDSNTKKAGKTGPMKTLLVRVMTPDLRERLENLRKKPENIPQPISNTSRANLNKLLTDYTEMKKAILHVYWEEFQKDPVGLMSRVAQPAPKNIDQRKLIPVKDGNERLTSSGFACSQCCQPLYVYKLEQVNDKGKPHTNYFGRCNVSEHERLILLSPHKPEANDELVTYSLGKFGQRALDFYSIHVTRESNHPVKPLEQIGGNSCASGPVGKALSDACMGAVASFLTKYQDIILEHQKVIKKNEKRLANLKDIASANGLAFPKITLPPQPHTKEGIEAYNNVVAQIVIWVNLNLWQKLKIGRDEAKPLQRLKGFPSFPLVERQANEVDWWDMVCNVKKLINEKKEDGKVFWQNLAGYKRQEALRPYLSSEEDRKKGKKFARYQFGDLLLHLEKKHGEDWGKVYDEAWERIDKKVEGLSKHIKLEEERRSEDAQSKAALTDWLRAKASFVIEGLKEADKDEFCRCELKLQKWYGDLRGKPFAIEAENSILDISGFSKQYNCAFIWQKDGVKKLNLYLIINYFKGGKLRFKKIKPEAFEANRFYTVINKKSGEIVPMEVNFNFDDPNLIILPLAFGKRQGREFIWNDLLSLETGSLKLANGRVIEKTLYNRRTRQDEPALFVALTFERREVLDSSNIKPMNLIGIDRGENIPAVIALTDPEGCPLSRFKDSLGNPTHILRIGESYKEKQRTIQAAKEVEQRRAGGYSRKYASKAKNLADDMVRNTARDLLYYAVTQDAMLIFENLSRGFGRQGKRTFMAERQYTRMEDWLTAKLAYEGLPSKTYLSKTLAQYTSKTCSNCGFTITSADYDRVLEKLKKTATGWMTTINGKELKVEGQITYYNRYKRQNVVKDLSVELDRLSEESVNNDISSWTKGRSGEALSLLKKRFSHRPVQEKFVCLNCGFETHADEQAALNIARSWLFLRSQEYKKYQTNKTTGNTDKRAFVETWQSFYRKKLKEVWKPAV

SEQ ID NO: 3932 - protein, 978 aa, Artificial Sequence
  CasX Protein Variant
MQEIKRINKIRRRLVKDSNTKKAGKTGPMKTLLVRVMTPDLRERLENLRKKPENIPQPISNTSRANLNKLLTDYTEMKKAILHVYWEEFQKDPVGLMSRVAQPAPKNIDQRKLIPVKDGNERLTSSGFACSQCCQPLYVYKLEQVNDKGKPHTNYFGRCNVSEHERLILLSPHKPEANDELVTYSLGKFGQRALDFYSIHVTRESNHPVKPLEQIGGNSCASGPVGKALSDACMGAVASFLTKYQDIILEHQKVIKKNEKRLANLKDIASANGLAFPKITLPPQPHTKEGIEAYNNVVAQIVIWVNLNLWQKLKIGRDEAKPLQRLKGFPSFPLVERQANEVDWWDMVCNVKKLINEKKEDGKVFWQNLAGYKRQEALLPYLSSKEDRKKGKKFARYQFGDLLLHLEKKHGEDWGKVYDEAWERIDKKVEGLSKHIKLEEERRSEDAQSKAALTDWLRAKASFVIEGLKEADKDEFCRCELKLQKWYGDLRGKPFAIEAENSILDISGFSKQYNCAFIWQKDGVKKLNLYLIINYFKGGKLRFKKIKPEAFEANRFYTVINKKSGEIVPMEVNFNFDDPNLIILPLAFGKRQGREFIWNDLLSLETGSLKLANGRVIEKTLYNRRTRQDEPALFVALTFERREVLDSSNIKPMNLIGIDRGENIPAVIALTDPEGCPLSRFKDSLGNPTHILRIGESYKEKQRTIQAAKEVEQRRAGGYSRKYASKAKNLADDMVRNTARDLLYYAVTQDAMLIFENLSRGFGRQGKRTFMAERQYTRMEDWLTAKLAYEGLPSKTYLSKTLAQYTSKTCSNCGFTITSADYDRVLEKLKKTATGWMTTINGKELKVEGQITYYNRYKRQNVVKDLSVELDRLSEESVNNDISSWTKGRSGEALSLLKKRFSHRPVQEKFVCLNCGFETHADEQAALNIARSWLFLRSQEYKKYQTNKTTGNTDKRAFVETWQSFYRKKLKEVWKPAV

SEQ ID NO: 3933 - protein, 978 aa, Artificial Sequence
  CasX Protein Variant
MQEIKRINKIRRRLVKDSNTKKAGKTGPMKTLLVRVMTPDLRERLENLRKKPENIPQPISNTSRANLNKLLTDYTEMKKAILHVYWEEFQKDPVGLMSRVAQPAPKNIDQRKLIPVKDGNERLTSSGFACSQCCQPLYVYKLEQVNDKGKPHTNYFGRCNVSEHERLILLSPHKPEANDELVTYSLGKFGQRALDFYSIHVTRESNHPVKPLEQIGGNSCASGPVGKALSDACMGAVASFLTKYQDIILEHQKVIKKNEKRLANLKDIASANGLAFPKITLPPQPHTKEGIEAYNNVVAQIVIWVNLNLWQKLKIGRDEAKPLQRLKGFPSFPLVERQANEVDWWDMVCNVKKLINEKKEDGKVFWQNLAGYKRQEALLPYLSSEEDRKKGKKFARYQFGDLLLHLEKKHGEDWGKVYDEAWERIDKKVEGLSKHIKLEEERRSEDAQSKAALTDWLRAKASFVIEGLKEADKDEFCRCELKLQKWYGDLRGKPFAIEAENSILDISGFSKQYNCAFIWQKDGVKKLNLYLIINYFKGGKLRFKKIKPEAFEANRFYTVINKKSGEIVPMEVNFNFDDPNLIILPLAFGKRQGREFIWNDLLSLETGSLKLANGRVIEKTLYNRRTRQDEPALFVALTFERREVLDSSNIKPMNLIGIDRGENIPAVIALTDPEGCPLSRFKDSLGNPTHILRIHESYKEKQRTIQAAKEVEQRRAGGYSRKYASKAKNLADDMVRNTARDLLYYAVTQDAMLIFENLSRGFGRQGKRTFMAERQYTRMEDWLTAKLAYEGLPSKTYLSKTLAQYTSKTCSNCGFTITSADYDRVLEKLKKTATGWMTTINGKELKVEGQITYYNRYKRQNVVKDLSVELDRLSEESVNNDISSWTKGRSGEALSLLKKRFSHRPVQEKFVCLNCGFETHADEQAALNIARSWLFLRSQEYKKYQTNKTTGNTDKRAFVETWQSFYRKKLKEVWKPAV

SEQ ID NO: 3934 - protein, 977 aa, Artificial Sequence
  CasX Protein Variant
MQEIKRINKIRRRLVKDSNTKKAGKTGPMKTLLVRVMTPDLRERLENLRKKPENIPQPISNTSRANLNKLLTDYTEMKKAILHVYWEEFQKDPVGLMSRVAQPAPKNIDQRKLIPVKDGNERLTSSGFACSQCCQPLYVYKLEQVNDKGKPHTNYFGRCNVSEHERLILLSPHKPEANDELVTYSLGKFGQRALDFYSIHVTRESNHPVKPLEQIGGNSCASGPVGKALSDACMGAVASFLTKYQDIILEHQKVIKKNEKRLANLKDIASANGLAFPKITLPPQPHTKEGIEAYNNVVAQIVIWVNLNLWQKLKIGRDEAKPLQRLKGFPSFPLVERQANEVDWWDMVCNVKKLINEKKEDGKVFWQNLAGYKRQEALRPYLSSEEDRKKGKKFARYQFGDLLLHLEKKHGEDWGKVYDEAWERIDKKVEGLSKHIKLEEERRSEDAQSKAALTDWLRAKASFVIEGLKEADKDEFKRCELKLQKWYGDLRGKPFAIEAENSILDISGFSKQYNCAFIWQKDGVKKLNLYLIINYFKGGKLRFKKIKPEAFEANRFYTVINKKSGEIVPMEVNFNFDDPNLIILPLAFGKRQGREFIWNDLLSLETGSLKLANGRVIEKTLYNRRTRQDEPALFVALTFERREVLDSSNIKPMNLIGIDRGENIPAVIALTDPEGCPLSRFKDSLGNPTHILRIGESYKEKQRTIQAKKEVEQRRAGGYSRKYASKAKNLADDMVRNTTRDLLYYAVTQDAMLIFENLSRGFGRQGKRTFMAERQYTRMEDWLTAKLAYEGLSKTYLSKTLAQYTSKTCSNCGFTITSADYDRVLEKLKKTATGWMTTINGKELKVEGQITYYNRYKRQNVVKDLSVELDRLSEESVNNDISSWTKGRSGEALSLLKKRFSHRPVQEKFVCLNCGFETHADEQAALNIARSWLFLRSQEYKKYQTNKTTGNTDKRAFVETWQSFYRKKLKEVWKPAV

SEQ ID NO: 3935 - protein, 978 aa, Artificial Sequence
  CasX Protein Variant
MQEIKRINKIRRRLVKDSNTKKAGKTGPMKTLLVRVMTPDLRERLENLRKKPENIPQPISNTSRANLNKLLTDYTEMKKAILHVYWEEFQKDPVGLMSRVAQPAPKNIDQRKLIPVKDGNERLTSSGFACSQCCQPLYVYKLEQVNDKGKPHTNYFGRCNVSEHERLILLSPHKPEANDELVTYSLGKFGQRALDFYSIHVTRESNHPVKPLEQIGGNSCASGPVGKALSDACMGAVASFLTKYQDIILEHQKVIKKNEKRLANLKDIASANGLAFPKITLPPQPHTKEGIRAYNNVVAQIVIWVNLNLWQKLKIGRDEAKPLQRLKGFPSFPLVERQANEVDWWDMVCNVKKLINEKKEDGKVFWQNLAGYKRQEALLPYLSSEEDRKKGKKFARYQFGDLLLHLEKKHGEDWGKVYDEAWERIDKKVEGLSKHIKLEEERRSEDAQSKAALTDWLRAKASFVIEGLKEADKDEFCRCELKLQKWYGDLRGKPFAIEAENSILDISGFSKQYNCAFIWQKDGVKKLNLYLIINYFKGGKLRFKKIKPEAFEANRFYTVINKKSGEIVPMEVNFNFDDPNLIILPLAFGKRQGREFIWNDLLSLETGSLKLANGRVIEKTLYNRRTRQDEPALFVALTFERREVLDSSNIKPMNLIGIDRGENIPAVIALTDPEGCPLSRFKDSLGNPTHILRIGESYKEKQRTIQAAKEVEQRRAGGYSRKYASKAKNLADDMVRNTARDLLYYAVTQDAMLIFENLSRGFGRQGKRTFMAERQYTRMEDWLTAKLAYEGLPSKTYLSKTLAQYTSKTCSNCGFTITSADYDRVLEKLKKTATGWMTTINGKELKVEGQITYYNRYKRQNVVKDLSVELDRLSEESVNNDISSWTKGRSGEALSLLKKRFSHRPVQEKFVCLNCGFETHADEQAALNIARSWLFLRSQEYKKYQTNKTTGNTDKRAFVETWQSFYRKKLKEVWKPAV

SEQ ID NO: 3936 - protein, 978 aa, Artificial Sequence; identical to SEQ ID NO: 3900
  CasX Protein Variant

SEQ ID NO: 3937 - protein, 978 aa, Artificial Sequence
  CasX Protein Variant
MQEIKRINKIRRRLVKDSNTKKAGRTGPMKTLLVRVMTPDLRERLENLRKKPENIPQPISNTSRANLNKLLTDYTEMKKAILHVYWEEFQKDPVGLMSRVAQPAPKNIDQRKLIPVKDGNERLTSSGFACSQCCQPLYVYKLEQVNDKGKPHTNYFGRCNVSEHERLILLSPHKPEANDELVTYSLGKFGQRALDFYSIHVTRESNHPVKPLEQIGGNSCASGPVGKALSDACMGAVASFLTKYQDIILEHQKVIKKNEKRLANLKDIASANGLAFPKITLPPQPHTKEGIEAYNNVVAQIVIWVNLNLWQKLKIGRDEAKPLQRLKGFPSFPLVERQANEVDWWDMVCNVKKLINEKKEDGKVFWQNLAGYKRQEALLPYLSSEEDRKKGKKFARYQFGDLLLHLEKKHGEDWGKVYDEAWERIDKKVEGLSKHIKLEEERRSEDAQSKAALTDWLRAKASFVIEGLKEADKDEFCRCELKLQKWYGDLRGKPFAIEAENSILDISGFSKQYNCAFIWQKDGVKKLNLYLIINYFKGGKLRFKKIKPEAFEANRFYTVINKKSGEIVPMEVNFNFDDPNLIILPLAFGKRQGREFIWNDLLSLETGSLKLANGRVIEKTLYNRRTRQDEPALFVALTFERREVLDSSNIKPMNLIGIDRGENIPAVIALTDPEGCPLSRFKDSLGNPTHILRIGESYKEKQRTIQAAKEVEQRRAGGYSRKYASKAKNLADDMVRNTARDLLYYAVTQDAMLIFENLSRGFGRQGKRTFMAERQYTRMEDWLTAKLAYEGLPSKTYLSKTLAQYTSKTCSNCGFTITSADYDRVLEKLKKTATGWMTTINGKELKVEGQITYYNRYKRQNVVKDLSVELDRLSEESVNNDISSWTKGRSGEALSLLKKRFSHRPVQEKFVCLNCGFETHADEQAALNIARSWLFLRSQEYKKYQTNKTTGNTDKRAFVETWQSFYRKKLKEVWKPAV

SEQ ID NO: 3938 - protein, 978 aa, Artificial Sequence
  CasX Protein Variant
MQEIKRINKIRRRLVKDSNTKKAGKTGPMKTLLVRVMTPDLRERLENLRKKPENIPQPISNTSRANLNKLLTDYTEMKKAILHVYWEEFQKDPVGLMSRVAQPAPKNIDQRKLIPVKDGNERLTSSGFACSQCCQPLYVYKLEQVNDKGKPHTNYFGRCNVSEHERLILLSPHKPEANDELVTYSLGKFGQRALDFYSIHVTRESNHPVKPLEQIGGNSCASGPVGKALSDACMGAVASFLTKYQDIILEHQKVIKKNEKRLANLKDIASANGLAFPKITLPPQPHTKEGIEAYNNVVAQIVIWVNLNLWQKLKIGRDEAKPLQRLKGFPSFPLVERQANEVDWWDMVCNVKKLINEKKEDGKVFWQNLAGYKRQEALLPYLSSEEDRKKGKKFARYQFGDLLLHLEKKHGEDWGKVYDEAWERIDKKVEGLSKHIKLEEERRSEDAQSKAALTDWLRAKASFVIEGLKEADKDEFCRCELKLQKWYGDLRGKPFAIEAENSILDISGFSKQYNCAFIWQKDGVKKLNLYLIINYFKGGKLRFKKIKPEAFEANRFYTVINKKSGEIVPMEVNFNFDDPNLIILPLAFGKRQGREFIWNDLLSLETGSLKLANGRVIEKTLYNRRTRQDEPALFVALTFERREVLDSSNIKPMNLIGIDRGENIPAVIALTDPEGCPLSRFKDSLGNPTHILRIGESYKEKQRTIQAAKEVEQRRAGGYSRKYASKAKNLADDMVRNTARDLLYYAVTQDAMLIFENLSRGFGRQGKRTFMAERQYTRMEDWLTAKLAYEGLPSKTYLSKTLAQYTSKTCSNCGFTITSADYDRVLEKLKKTATGWMTTINGKELKVEGQITYYNRYKRQNVVKDLSVELDRLSEESVNNDISSWTKGRSGEALSLLKKRFSHRPVQEKFVCLNCGFETHADEQAALNIARSWLFLRSQEYKKYQTNKTTGNTDKRAFVETWQSFYRKKLKEVWRPAV

SEQ ID NO: 3939 - protein, 978 aa, Artificial Sequence
  CasX Protein Variant
MQEIKRINKIRRRLVKDSNTKKAGKTGPMKTLLVRVMTPDLRERLENLRKKPENIPQPISNTSRANLNKLLTDYTEMKKAILHVYWEEFQKDPVGLMSRVAQPAPKNIDQRKLIPVKDGNERLTSSGFACSQCCQPLYVYKLEQVNDKGKPHTNYFGRCNVSEHERLILLSPHKPEANDELVTYSLGKFGQRALDFYSIHVTRESNHPVKPLEQIGGNSCASGPVGKALSDACMGAVASFLTKYQDIILEHQKVIKKNEKRLANLKDIASANGLAFPKITLPPQPHTKEGIEAYNNVVAQIVIWVNLNLWQKLKIGRDEAKPLQRLKGFPSFPLVERQANEVDWWDMVCNVKKLINEKKEDGKVFWQNLAGYKRQEALLPYLSSEEDRKKGKKFARYQFGDLLLHLEKKHGEDWGKVYDEAWERIDKKVEGLSKHIKLEEERRSEDAQSKAALTDWLRAKASFVIEGLKEADKDEFCRCELKLQKWYGDLRGKPFAIEAENSILDISGFSKQYNCAFIWQKDGVKKLNLYLIINYFKGGKLRFKKIKPEAFEANRFYTVINKKSGEIVPMEVNFNFDDPNLIILPLAFGKRQGREFIWNDLLSLETGSLKLANGRVIEKTLYNRRTRQDEPALFVALTFERREVLDSSNIKPMNLIGIDRGENIPAVIALTDPEGCPLSRFKDSLGNPTHILRIGESYKEKQRTIQAAKEVEQRRAGGYSRKYASKAKNLADDMVRNTARDLLYYAVTQDAMLIFENLSRGFGRQGKRTFMAERQYTRMEDWLTAKLAYEGLPSKTYLSKTLAQYTSKTCSNCGFTITSADYDRVLEKLKKTATGWMTTINGKELKVEGQITYYNRYKRQNVVKDLSVELDRLSEESVNNDISSWTKGRSGEALSLLKKRFSHRPVQEKFVCLNCGFETHADEQAALNIARSWLFLRSQEYKKYQTNKTTGNTDKRAFMETWQSFYRKKLKEVWKPAV

SEQ ID NO: 3940 - protein, 978 aa, Artificial Sequence
  CasX Protein Variant
MQEIKRINKIRRRLVKDSNTKKAGKTGPMKTLLVRVMTPDLRERLENLRKKPENIPQPISNTSRANLNKLLTDYTEMKKAILHVYWEEFQKDPVGLMSRVAQPAPKNIDQRKLIPVKDGNERLTSSGFACSQCCQPLYVYKLEQVNDKGKPHTNYFGRCNVSEHERLILLSPHKPEANDELVTYSLGKFGQRALDFYSIHVTRESNHPVKPLEQIGGNSCASGPVGKALSDACMGAVASFLTKYQDIILEHQKVIKKNEKRLANLKDIASANGLAFPKITLPPQPHTKEGIEAYNNVVAQIVIWVNLNLWQKLKIGRDEAKPLQRLKGFPSFPLVERQANEVDWWDMVCNVKKLINEKKEDGKVFWQNLAGYKRQEALLPYLSSEEDRKKGKKFARYQFGDLLLHLEKKHGEDWGKVYDEAWERIDKKVEGLSKHIKLEEERRSEDAQSKAALTDWLRAKASFVIEGLKEADKDEFCRCELKLQKWYGSLRGKPFAIEAENSILDISGFSKQYNCAFIWQKDGVKKLNLYLIINYFKGGKLRFKKIKPEAFEANRFYTVINKKSGEIVPMEVNFNFDDPNLIILPLAFGKRQGREFIWNDLLSLETGSLKLANGRVIEKTLYNRRTRQDEPALFVALTFERREVLDSSNIKPMNLIGIDRGENIPAVIALTDPEGCPLSRFKDSLGNPTHILRIGESYKEKQRTIQAAKEVEQRRAGGYSRKYASKAKNLADDMVRNTARDLLYYAVTQDAMLIFENLSRGFGRQGKRTFMAERQYTRMEDWLTAKLAYEGLPSKTYLSKTLAQYTSKTCSNCGFTITSADYDRVLEKLKKTATGWMTTINGKELKVEGQITYYNRYKRQNVVKDLSVELDRLSEESVNNDISSWTKGRSGEALSLLKKRFSHRPVQEKFVCLNCGFETHADEQAALNIARSWLFLRSQEYKKYQTNKTTGNTDKRAFVETWQSFYRKKLKEVWKPAV

SEQ ID NO: 3941 - protein, 978 aa, Artificial Sequence
  CasX Protein Variant
MQEIKRINKIRRRLVKDSNTKKAGKTGPMKTLLVRVMTPDLRERLENLRKKPENIPQPISNTSRANLNKLLTDYTEMKKAILHVYWEEFQKDPVGLMSRVAQPAPKNIDQRKLIPVKDGNERLTSSGFACSQCCQPLYVYKLEQVNDKGKPHTNYFGRCNVSEHERLILLSPHKPEANDELVTYSLGKFGQRALDFYSIHVTRESNHPVKPLEQIGGNSCASGPVGKALSDACMGAVASFLTKYQDIILEHQKVIKKNEKRLANLKDIASANGLAFPKITLPPQPHTKEGIEAYNNVVAQIVIWVNLNLWQKLKIGRDEAKPLQRLKGFPSFPLVERQANEVDWWDMVCNVKKLINEKKEDGKVFWQNLAGYKRQEALLPYLSSEEDRKKGKKFARYQFGDLLLHLEKKHGEDWGKVYDEAWERIDKKVEGLSKHIKLEEERRSEDAQSKAALTDWLRAKASFVIEGLKEADKDEFCRCELKLQKWYGDLRGKPFAIEAENSILDISGFSKQYNCAFIWQKDGVKKLNLYLIINYFKGGKLRFKKIKPEAFEANRFYTVINKKSGEIVPMEVNFNFDDPNLIILPLAFGKRQGREFIWNDLLSLETGSLKLANGRVIEKTLYNRRTRQDEPALFVALTFERREVLDSSNIKPMNLIGIDRGENIPAVIALTDPEGCPLSRFKDSLGNPTHILRIGESYKEKQRTIQAAKEVEQRRAGGYSRKYASKAKNLADDMVRNTARDLLYYAVTQDAMLIFENLSRGFGRQGKRTFMAERQYTRMEDWLTAKLAYEGLPSKTYLSKTLAQYTSSTCSNCGFTITSADYDRVLEKLKKTATGWMTTINGKELKVEGQITYYNRYKRQNVVKDLSVELDRLSEESVNNDISSWTKGRSGEALSLLKKRFSHRPVQEKFVCLNCGFETHADEQAALNIARSWLFLRSQEYKKYQTNKTTGNTDKRAFVETWQSFYRKKLKEVWKPAV

SEQ ID NO: 3942 - protein, 978 aa, Artificial Sequence
  CasX Protein Variant
MQEIKRINKIRRRLVKDSNTKKAGKTGPMKTLLVRVMTPDLRERLENLRKKPENIPQPISNTSRANLNKLLTDYTEMKKAILHVYWEEFQKDPVGLMSRVAQPAPKNIDQRKLIPVKDGNERLTSSGFACSQCCQPLYVYKLEQVNDKGKPHTNYFGRCNVSEHERLILLSPHKPEANDELVTYSLGKFGQRALDFYSIHVTRESNHPVKPLEQIGGNSCASGPVGKALSDACMGAVASFLTKYQDIILEHQKVIKKNEKRLANLKDIASANGLAFPKITLPPQPHTKEGIEAYNNVVAQIVIWVNLNLWQKLKIGRDEAKPLQRLKGFPSFPLVERQANEVDWWDMVCNVKKLINEKKEDGKVFWQNLAGYKRQEALLPYLSSEEDRKKGKKFARYQFGDLLLHLEKKHGEDWGKVYDEAWERIDKKVEGLSKHIKLEEERRSEDAQSKAALTDWLRAKASFVIEGLKEADKDEFCRCELKLQKWYGDLRGKPFAIEAENSILDISGFSKQYNCAFIWQKDGVKKLNLYLIINYFKGGKLRFKKIKPEAFEANRFYTVINKKSGEIVPMEVNFNFDDPNLIILPLAFGKRQGREFIWNDLLSLETGSLKLANGRVIEKTLYNRRTRQDEPALFVALTFERREVLDSSNIKPMNLIGIDRGENIPAVIALTDPEGCPLSRFKDSLGNPTHILRIGESYKEKQRTIQAAKEVEQRRAGGYSRKYASKAKNLADDMVRNTARDLLYYAVTQDAMLIFENLSRGFGRQGKRTFMAERQYTRMEDWLTAKLAYEGLPSKTYLSKTLAQYTSKTCSNCGFTITSADYDRVLEKLKKTATGWMTTINGKELKVEGQITYYNRYKRQNVVKDLSVELDRLSEESVNNDISSWTKGRSGEALSLLKKRFSHRPVQEKFVCLNCGFETHADEQAALNIARSWLFLRSQEYKKYQTNKTTGTTDKRAFVETWQSFYRKKLKEVWKPAV

SEQ ID NO: 3943 - protein, 978 aa, Artificial Sequence
  CasX Protein Variant
MQEIKRINKIRRRLVKDSNTKKAGKTGPMKTLLVRVMTPDLRERLENLRKKPENIPQPISNTSRANLNKLLTDYTEMKKAILHVYWEEFQKDPVGLMSRVAQPAPKNIDQRKLIPVKDGNERLTSSGFACSQCCQPLYVYKLEQVNDKGKPHTNYFGRCNVSEHERLILLSPHKPEANDELVTYSLGKFGQRALDFYSIHVTRESNHPVKPLEQIGGNSCASGPVGKALSDACMGAVASFLTKYQDIILEHQKVIKKNEKRLANLKDIASANGLAFPKITLPPQPHTKEGIEAYNNVVAQIVIWVNLNLWQKLKIGRDEAKPLQRLKGFPSFPLVERQANEVDWWDMVCNVKKLINEKKEDGKVFWQNLAGYKRQEALLPYLSSEEDRKKGKKFARYQFGDLLLHLEKKHGEDWGKVYDEAWERIDKKVEGLSKHIKLEEERRSEDAQSKAALTDWLRAKASFVIEGLKEADKDEFCRCELKLQKWYGDLRGKPFAIEAENSILDISGFSKQYNCAFIWQKDGVKKLNLYLIINYFKGGKLRFKKIKPEAFEANRFYTVINKKSGEIVPMEVNFNFDDPNLIILPLAFGKRQGREFIWNDLLSLETGSLKLANGRVIEKTLYNRRTRQDEPALFVALTFERREVLDSSNIKPMNLIGIDRGENIPAVIALTDPEGCPLSRFKDSLGNPTHILRIGESYKEKQRTIQAAKEVEQRRAGGYSRKYASKAKNLADDMVRNTARDLLYYAVTQDAMLIFENLSRGFGRQGKRTFMAERQYTRMEDWLTAKLAYEGLPSKTYLSKTLAQYTSKTCSNCGFTITSADYDRVLEKLKKTATGWMTTINGKELKVEGQITYYNRYKRQNVVKDLSVELDRLSEESVNNDISSWTKGRSGEALSLLKKRFSHRPVQEKFVCLNCGFETHADEQAALNIARSWLFLRSQEYKKYQTNKTTGNTDKRAFVETWQSFYRKKLKEVWQPAV

SEQ ID NO: 3944 - protein, 978 aa, Artificial Sequence
  CasX Protein Variant
MQEIKRINKIRRRLVKDSNTKKAGKTGPMKTLLVRVMTPDLRERLENLRKKPENIPQPISNTSRANLNKLLTDYTEMKKAILHVYWEEFQKDPVGLMSRVAQPAPKNIDQRKLIPVKDGNERLTSSGFACSQCCQPLYVYKLEQVNDKGKPHTNYFGRCNVSEHERLILLSPHKPEANDELVTYSLGKFGQRALDFYSIHVTRESNHPVKPLEQIGGNSCASGPVGKALSDACMGAVASFLTKYQDIILEHQKVIKKNEKRLANLKDIASANGLAFPKITLPPQPHTKEGIEAYNNVVAQIVIWVNLNLWQKLKIGRDEAKPLQRLKGFPSFPLVERQANEVDWWDMVCNVKKLINEKKEDGKVFWQNLAGYKRQEALLPYLSSEEDRKKGKKFARYQFGDLLLHLEKKHGEDWGKVYDEAWERIDKKVEGLSKHIKLEEERRSEDAQSKAALTDWLRAKASFVIEGLKEADKDEFCRCELKLQKWYGDLRGKPFAIEAENSILDISGFSKQYNCAFIWQKDGVKKLNLYLIINYFKGGKLRFKKIKPEAFEANRFYTVINKKSGEIVPMEVNFNFDDPNLIILPLAFGKRQGREFIWNDLLSLETGSLKLANGRVIEKTLYNRRTRQDEPALFVALTFERREVLDSSNIKPMNLIGIDRGENIPAVIALTDPEGCPLSRFKDSLGNPTHILRIGESYKEKQRTIQAAKEVEQRRAGGYSRKYASKAKNLADDMVRNTARDLLYYAVTQDAMLIFENLSRGFGRQGKRTFMAERQYTRMEDWLTAKLAYEGLPSKTYLSKTLAQYTSKTCSNCGFTITSADYDRVLEKLKKTATGWMTTINGKELKVEGQITYYNRYKRQNVVKDLSVELDRLSEESVNNDISSWTKGRRGEALSLLKKRFSHRPVQEKFVCLNCGFETHADEQAALNIARSWLFLRSQEYKKYQTNKTTGNTDKRAFVETWQSFYRKKLKEVWKPAV

SEQ ID NO: 3945 - protein, 977 aa, Artificial Sequence
  CasX Protein Variant
MQEIKRINKIRRRLVKDSNTKKAGKTGPMKTLLVRVMTPDLRERLENLRKKPENIPQPISNTSRANLNKLLTDYTEMKKAILHVYWEEFQKDPVGLMSRVAQPAPKNIDQRKLIPVKDGNERLTSSGFACSQCCQPLYVYKLEQVNDKGKPHTNYFGRCNVSEHERLILLSPHKPEANDELVTYSLGKFGQRALDFYSIHVTRESNHPVKPLEQIGGNSCASGPVGKALSDACMGAVASFLTKYQDIILEHQKVIKKNEKRLANLKDIASANGLAFPKITLPPQPHTKEGIEAYNNVVAQIVIWVNLNLWQKLKIGRDEAKPLQRLKGFPSFPLVERQANEVDWWDMVCNVKKLINEKKEDGKVFWQNLAGYKRQEALLPYLSSEEDRKKGKKFARYQFGDLLLHLEKKHGEDWGKVYDEAWERIDKKVEGLSKHIKLEEERRSEDAQSKAALTDWLRAKASFVIEGLKEADKDEFCRCELKLQKWYGDLRGKPFAIEAENSILDISGFSKQYNCAFIWQKDGVKKLNLYLIINYFKGGKLRFKKIKPEAFEANRFYTVINKKSGEIVPMEVNFNFDDPNLIILPLAFGKRQGREFIWNDLLSLETGSLKLANGRVIEKTLYNRRTRQDEPALFVALTFERREVLDSSNIKPMNLIGIDRGENIPAVIALTDPEGCPLSRFKDSLGNPTHILRIGESYKEKQRTIQAAKEVEQRRAGGYSRKYASKAKNLADDMVRNTARDLLYYAVTQDAMLIFENLSRGFGRQGKRTFMAERQYTRMEDWLTAKLAYEGLSKTYLSKTLAQYTSKTCSNCGFTITSADYDRVLEKLKKTATGWMTTINGKELKVEGQITYYNRYKRQNVVKDLSVELDRLSEESVNNDISSWTKGRSGEALSLLKKRFSHRPVQEKFVCLNCGFETHADEQAALNIARSWLFLRSQEYKKYQTNKTTGNTDKRAFVETWQSFYRKKLKEVWKPAV

SEQ ID NO: 3946 - protein, 978 aa, Artificial Sequence
  CasX Protein Variant
MQEIKRINKIRRRLVKDSNTKKAGKTGPMKTLLVRVMTPDLRERLENLRKKPENIPQPISNTSRANLNKLLTDYTEMKKAILHVYWEEFQKDPVGLMSRVAQPAPKNIDQRKLIPVKDGNERLTSSGFACSQCCQPLYVYKLEQVNDKGKPHTNYFGRCNVSEHERLILLSPHKPEANDELVTYSLGKFGQRALDFYSIHVTRESNHPVKPLEQIGGNSCASGPVGKALSDACMGAVASFLTKYQDIILEHQKVIKKNEKRLANLKDIASANGLAFPKITLPPQPHTKEGIEAYNNVVAQIVIWVNLNLWQKLKIGRDEAKPLQRLKGFPSFPLVERQANEVDWWDMVCNVKKLINEKKEDGKVFWQNLAGYKRQEALLPYLSSEEDRKKGKKFARYQFGDLLLHLEKKHGEDWGKVYDEAWERIDKKVEGLSKHIKLEEERRSEDAQSKAALTDWLRAKASFVIEGLKEADKDEFCRCELKLQKWYGDLRGKPFAIEAENSILDISGFSKQYNCAFIWQKDGVKKLNLYLIINYFKGGKLRFKKIKPEAFEANRFYTVINKKSGEIVPMEVNFNFDDPNLIILPLAFGKRQGREFIWNDLLSLETGSLKLANGRVIEKTLYNRRTRQDEPALFVALTFERREVLDSSNIKPMNLIGIDRGENIPAVIALTDPEGCPLSRFKDSLGNPTHILRIGESYKEKQRTIQAAKEVEQRRAGGYSRKYASKAKNLADDMVRNTARDLLYYAVTQDAMLIFENLSRGFGRQGKRTFMAERQYTRMEDWLTAKLWYEGLPSKTYLSKTLAQYTSKTCSNCGFTITSADYDRVLEKLKKTATGWMTTINGKELKVEGQITYYNRYKRQNVVKDLSVELDRLSEESVNNDISSWTKGRSGEALSLLKKRFSHRPVQEKFVCLNCGFETHADEQAALNIARSWLFLRSQEYKKYQTNKTTGNTDKRAFVETWQSFYRKKLKEVWKPAV

SEQ ID NO: 3947 - protein, 978 aa, Artificial Sequence
  CasX Protein Variant
MQEIKRINKIRRRLVKDSNTKKAGKTGPMKTLLVRVMTPDLRERLENLRKKPENIPQPISNTSRANLNKLLTDYTEMKKAILHVYWEEFQKDPVGLMSRVAQPAPKNIDQRKLIPVKDGNERLTSSGFACSQCCQPLYVYKLEQVNDKGKPHTNYFGRCNVSEHERLILLSPHKPEANDELVTYSLGKFGQRALDFYSIHVTRESNHPVKPLEQIGGNSCASGPVGKALSDACMGAVASFLTKYQDIILEHQKVIKKNEKRLANLKDIASANGLAFPKITLPPQPHTKEGIEAYNNVVAQIVIWVNLNLWQKLKIGRDEAKPLQRLKGFPSFPLVERRENEVDWWDMVCNVKKLINEKKEDGKVFWQNLAGYKRQEALLPYLSSEEDRKKGKKFARYQFGDLLLHLEKKHGEDWGKVYDEAWERIDKKVEGLSKHIKLEEERRSEDAQSKAALTDWLRAKASFVIEGLKEADKDEFCRCELKLQKWYGDLRGKPFAIEAENSILDISGFSKQYNCAFIWQKDGVKKLNLYLIINYFKGGKLRFKKIKPEAFEANRFYTVINKKSGEIVPMEVNFNFDDPNLIILPLAFGKRQGREFIWNDLLSLETGSLKLANGRVIEKTLYNRRTRQDEPALFVALTFERREVLDSSNIKPMNLIGIDRGENIPAVIALTDPEGCPLSRFKDSLGNPTHILRIGESYKEKQRTIQAAKEVEQRRAGGYSRKYASKAKNLADDMVRNTARDLLYYAVTQDAMLIFENLSRGFGRQGKRTFMAERQYTRMEDWLTAKLAYEGLPSKTYLSKTLAQYTSKTCSNCGFTITSADYDRVLEKLKKTATGWMTTINGKELKVEGQITYYNRYKRQNVVKDLSVELDRLSEESVNNDISSWTKGRSGEALSLLKKRFSHRPVQEKFVCLNCGFETHADEQAALNIARSWLFLRSQEYKKYQTNKTTGNTDKRAFVETWQSFYRKKLKEVWKPAV

SEQ ID NO: 3948 - protein, 978 aa, Artificial Sequence
  CasX Protein Variant
MQEIKRFNKIRRRLVKDSNTKKAGKTGPMKTLLVRVMTPDLRERLENLRKKPENIPQPISNTSRANLNKLLTDYTEMKKAILHVYWEEFQKDPVGLMSRVAQPAPKNIDQRKLIPVKDGNERLTSSGFACSQCCQPLYVYKLEQVNDKGKPHTNYFGRCNVSEHERLILLSPHKPEANDELVTYSLGKFGQRALDFYSIHVTRESNHPVKPLEQIGGNSCASGPVGKALSDACMGAVASFLTKYQDIILEHQKVIKKNEKRLANLKDIASANGLAFPKITLPPQPHTKEGIEAYNNVVAQIVIWVNLNLWQKLKIGRDEAKPLQRLKGFPSFPLVERQANEVDWWDMVCNVKKLINEKKEDGKVFWQNLAGYKRQEALLPYLSSEEDRKKGKKFARYQFGDLLLHLEKKHGEDWGKVYDEAWERIDKKVEGLSKHIKLEEERRSEDAQSKAALTDWLRAKASFVIEGLKEADKDEFCRCELKLQKWYGDLRGKPFAIEAENSILDISGFSKQYNCAFIWQKDGVKKLNLYLIINYFKGGKLRFKKIKPEAFEANRFYTVINKKSGEIVPMEVNFNFDDPNLIILPLAFGKRQGREFIWNDLLSLETGSLKLANGRVIEKTLYNRRTRQDEPALFVALTFERREVLDSSNIKPMNLIGIDRGENIPAVIALTDPEGCPLSRFKDSLGNPTHILRIGESYKEKQRTIQAAKEVEQRRAGGYSRKYASKAKNLADDMVRNTARDLLYYAVTQDAMLIFENLSRGFGRQGKRTFMAERQYTRMEDWLTAKLAYEGLPSKTYLSKTLAQYTSKTCSNCGFTITSADYDRVLEKLKKTATGWMTTINGKELKVEGQITYYNRYKRQNVVKDLSVELDRLSEESVNNDISSWTKGRSGEALSLLKKRFSHRPVQEKFVCLNCGFETHADEQAALNIARSWLFLRSQEYKKYQTNKTTGNTDKRAFVETWQSFYRKKLKEVWKPAV

SEQ ID NO: 3949 - protein, 978 aa, Artificial Sequence
  CasX Protein Variant
MQEIKRINKIRRRLVKDSNTKKAGKTGPMKTLLVRVMTPDLRERLENLRKKPENIPQPISNTSRANLNKLLTDYTEMKKAILHVYWEEFQKDPVGLMSRVAQPAPKNIDQRKLIPVKDGNERLTSSGFACSQCCQPLYVYKLEQVNDKGKPHTNYFGRCNVSEHERLILLSPHKPEANDELVTYSLGKFGQRALDFYSIHVTRESNHPVKPLEQIGGNSCASGPVGKALSDACMGAVASFLTKYQDIILEHQKVIKKNEKRLANLKDIASANGLAFPKITLPPQPHTKEGIEAYNNVVAQIVIWVNLNLWQKLKIGRDEAKPLQRLKGFPSFPLVERQANEVDWWDMVCNVKKLINEKKEDGKVFWQNLAGYKRQEALLPYLSSEEDRKKGKKFARYQFGDLLLHLEKKHGEDWGKVYDEAWERIDKKVEGLSKHIKLEEERRSEDAQSKAALTDWLRAKASFVIEGLKEADKDEFCRCELKLQKWYGDLRGKPFAIEAENSILDISGFSKQYNCAFIWQKDGVKKLNLYLIINYFKGGKLRFKKIKPEAFEANRFYTVINKKSGEIVPMEVNFNFDDPNLIILPLAFGKRQGREFIWNDLLSLETGSLKLANGRVIEKTLYNRRTRQDEPALFVALTFERREVLDSSNIKPMNLIGIDRGENIPAVIALTDPEGCPLSRFKDSLGNPTHILRIGESYKEKQRTIQAAKEVEQRRAGGYSRKYASKAKNLADDMVRNTARDLLYYAVTQDAMLIFENLSRGFGRQGKRTFMAERQYTRMEDWLTAKLAYEGLPSKTYLSKTLAQYTSKTCSNCGFTITSADYDRVLEKLKKTATGWMTTINGKELKVEGQITYYNRYKRQNVVKDLSVELDRLSEESVNNDISSWTKGRSGEALSLLKKRFSHRPVQEKFVCLNCGFETHADEQAALNIARSWLFLRSQEYKKYKINKTTGNTDKRAFVETWQSFYRKKLKEVWKPAV

SEQ ID NO: 3950 - protein, 978 aa, Artificial Sequence
  CasX Protein Variant
MQEIKRINKIRRRLVKDSNTKKAGKTGPMKTLLVRVMTPDLRERLENLRKKPENIPQPISNTSRANLNKLLTDYTEMKKAILHVYWEEFQKDPVGLMSRVAQPAPKNIDQRKLIPVKDGNERLTSSGFACSQCCQPLYVYKLEQVNDKGKPHTNYFGRCNVSEHERLILLSPHKPEANDELVTYSLGKFGQRALDFYSIHVTRESNHPVKPLEQIGGNSCASGPVGKALSDACMGAVASFLTKYQDIILEHQKVIKKNEKRLANLKDIASANGLAFPKITLPPQPHTKEGIEAYNNVVAQIVIWVNLNLWQKLKIGRDEAKPLQRLKGFPSFPLVERQANEVDWWDMVCNVKKLINEKKEDGKVFWQNLAGYKRQEALLPYLSSEEDRKKGKKFARYQFGDLLLHLEKKHGEDWGKVYDEAWERIDKKVEGLSKHIKLEEERRSEDAQSKAALTDWLRAKASFVIEGLKEADKDEFCRCELKLQKWYGDLRGKPFAIEAENSILDISGFSKQYNCAFIWQKDGVKKLNLYLIINYFKGGKLRFKKIKPEAFEANRFYTVINKKSGEIVPMEVNFNFDDPNLIILPLAFGKRQGREFIWNDLLSLETGSLKLANGRVIEKTLYNRRTRQDEPALFVALTFERREVLDSSNIKPMNLIGIDRGENIPAVIALTDPEGCPLSRFEDSLGNPTHILRIGESYKEKQRTIQAAKEVEQRRAGGYSRKYASKAKNLADDMVRNTARDLLYYAVTQDAMLIFENLSRGFGRQGKRTFMAERQYTRMEDWLTAKLAYEGLPSKTYLSKTLAQYTSKTCSNCGFTITSADYDRVLEKLKKTATGWMTTINGKELKVEGQITYYNRYKRQNVVKDLSVELDRLSEESVNNDISSWTKGRSGEALSLLKKRFSHRPVQEKFVCLNCGFETHADEQAALNIARSWLFLRSQEYKKYQTNKTTGNTDKRAFVETWQSFYRKKLKEVWKPAV

SEQ ID NO: 3951 - protein, 978 aa, Artificial Sequence
  CasX Protein Variant
MQEIKRINKIRRRLVKDSNTKKAGKTGPMKTLLVRVMTPDLRERLENLRKKPENIPQPISNTSRANLNKLLTDYTEMKKAILHVYWEEFQKDPVGLMSRVAQPAPKNIDQRKLIPVKDGNERLTSSGFACSQCCQPLYVYKLEQVNDKGKPHTNYFGRCNVSEHERLILLSPHKPEANDELVTYSLGKFGQRALDFYSIHVTRESNHPVKPLEQIGGNSCASGPVGKALSDACMGAVASFLTKYQDIILEHQKVIKKNEKRLANLKDIASANGLAFPKITLPPQPHTKEGIEAYNNVVAQIVIWVNLNLWQKLKIGRDEAKPLQRLKGFPSFPLVERQANEVDWWDMVCNVKKLINEKKEDGKVFWQNLAGYKRQEALLPYLSSAEDRKKGKKFARYQFGDLLLHLEKKHGEDWGKVYDEAWERIDKKVEGLSKHIKLEEERRSEDAQSKAALTDWLRAKASFVIEGLKEADKDEFCRCELKLQKWYGDLRGKPFAIEAENSILDISGFSKQYNCAFIWQKDGVKKLNLYLIINYFKGGKLRFKKIKPEAFEANRFYTVINKKSGEIVPMEVNFNFDDPNLIILPLAFGKRQGREFIWNDLLSLETGSLKLANGRVIEKTLYNRRTRQDEPALFVALTFERREVLDSSNIKPMNLIGIDRGENIPAVIALTDPEGCPLSRFKDSLGNPTHILRIGESYKEKQRTIQAAKEVEQRRAGGYSRKYASKAKNLADDMVRNTARDLLYYAVTQDAMLIFENLSRGFGRQGKRTFMAERQYTRMEDWLTAKLAYEGLPSKTYLSKTLAQYTSKTCSNCGFTITSADYDRVLEKLKKTATGWMTTINGKELKVEGQITYYNRYKRQNVVKDLSVELDRLSEESVNNDISSWTKGRSGEALSLLKKRFSHRPVQEKFVCLNCGFETHADEQAALNIARSWLFLRSQEYKKYQTNKTTGNTDKRAFVETWQSFYRKKLKEVWKPAV

SEQ ID NO: 3952 - protein, 978 aa, Artificial Sequence
  CasX Protein Variant
MQEIKRINKIRRRLVKDSNTKKAGKTGPMKTLLVRVMTPDLRERLENLRKKPENIPQPISNTSRANLNKLLTDYTEMKKAILHVYWEEFQKDPVGLMSRVAQPAPKNIDQRKLIPVKDGNERLTSSGFACSQCCQPLYVYKLEQVNDKGKPHTNYFGRCNVSEHERLILLSPHKPEANDELVTYSLGKFGQRALDFYSIHVTRESNHPVKPLEQIGGNSCASGPVGKALSDACMGAVASFLTKYQDIILEHQKVIKKNEKRLANLKDIASANGLAFPKITLPPQPHTKEGIEAYNNVVAQIVIWVNLNLWQKLKIGRDEAKPLQRLKGFPSFPLVERQANEVDWWDMVCNVKKLINEKKEDGKVFWQNLAGYKRQEALLPYLSSEEDRKKGKKFARYQFGDLLLHLEKKHGEDWGKVYDEAWERIDKKVEGLSKHIKLEEERRSEDAQSKAALTDWLRAKASFVIEGLKEADKDEFCRCELKLQKWYGDLRGKPFAIEAENSILDISGFSKQYNCAFIWQKDGVKKLNLYLIINYFKGGKLRFKKIKPEAFEANRFYTVINKKSGEIVPMEVNFNFDDPNLIILPLAFGKRQGREFIWNDLLSLETGSLKLANGRVIEKTLYNRRTRQDEPALFVALTFERREVLDSSNIKPMNLIGIDRGENIPAVIALTDPEGCPLSRFKDSLGNPTHILRIGESYKEKQRTIQAAKEVEQRRAGGYSRKYASKAKNLADDMVRNTARDLLYYAVTQDAMLIFENLSRGFGRQGKRTFMAERQYTRMEDWLTAKLAYEGLSSKTYLSKTLAQYTSKTCSNCGFTITSADYDRVLEKLKKTATGWMTTINGKELKVEGQITYYNRYKRQNVVKDLSVELDRLSEESVNNDISSWTKGRSGEALSLLKKRFSHRPVQEKFVCLNCGFETHADEQAALNIARSWLFLRSQEYKKYQTNKTTGNTDKRAFVETWQSFYRKKLKEVWKPAV

SEQ ID NO: 3953 - protein, 978 aa, Artificial Sequence
  CasX Protein Variant
MQEIKRINKIRRRLVKDSNTKKAGKTGPMKTLLVRVMTPDLRERLENLRKKPENIPQPISNTSRANLNKLLTDYTEMKKAILHVYWEEFQKDPVGLMSRVAQPAPKNIDQRKLIPVKDGNERLTSSGFACSQCCQPLYVYKLEQVNDKGKPHTNYFGRCNVSEHERLILLSPHKPEANDELVTYSLGKFGQRALDFYSIHVTRESNHPVKPLEQIGGNSCASGPVGKALSDACMGAVASFLTKYQDIILEHQKVIKKNEKRLANLKDIASANGLAFPKITLPPQPHTKEGIEAYNNVVAQIVIWVNLNLWQKLKIGRDEAKPLQRLKGFPSFPLVERQANEVDWWDMVCNVKKLINEKKEDGKVFWQNLAGYKRQEALLPYLSSQEDRKKGKKFARYQFGDLLLHLEKKHGEDWGKVYDEAWERIDKKVEGLSKHIKLEEERRSEDAQSKAALTDWLRAKASFVIEGLKEADKDEFCRCELKLQKWYGDLRGKPFAIEAENSILDISGFSKQYNCAFIWQKDGVKKLNLYLIINYFKGGKLRFKKIKPEAFEANRFYTVINKKSGEIVPMEVNFNFDDPNLIILPLAFGKRQGREFIWNDLLSLETGSLKLANGRVIEKTLYNRRTRQDEPALFVALTFERREVLDSSNIKPMNLIGIDRGENIPAVIALTDPEGCPLSRFKDSLGNPTHILRIGESYKEKQRTIQAAKEVEQRRAGGYSRKYASKAKNLADDMVRNTARDLLYYAVTQDAMLIFENLSRGFGRQGKRTFMAERQYTRMEDWLTAKLAYEGLPSKTYLSKTLAQYTSKTCSNCGFTITSADYDRVLEKLKKTATGWMTTINGKELKVEGQITYYNRYKRQNVVKDLSVELDRLSEESVNNDISSWTKGRSGEALSLLKKRFSHRPVQEKFVCLNCGFETHADEQAALNIARSWLFLRSQEYKKYQTNKTTGNTDKRAFVETWQSFYRKKLKEVWKPAV

SEQ ID NO: 3954 - protein, 978 aa, Artificial Sequence
  CasX Protein Variant
MQEIKRINKIRRRLVKDSNTKKAGKTGPMKTLLVRVMTPDLRERLENLRKKPENIPQPISNTSRANLNKLLTDYTEMKKAILHVYWEEFQKDPVGLMSRVAQPAPKNIDQRKLIPVKDGNERLTSSGFACSQCCQPLYVYKLEQVNDKGKPHTNYFGRCNVSEHERLILLSPHKPEANDELVTYSLGKFGQRALDFYSIHVTRESNHPVKPLEQIGGNSCASGPVGKALSDACMGAVASFLTKYQDIILEHQKVIKKNEKRLANLKDIASANGLAFPKITLPPQPHTKEGIEAYNNVVAQIVIWVNLNLWQKLKIGRDEAKPLQRLKGFPSFPLVERQANEVDWWDMVCNVKKLINEKKEDGKVFWQNLAGYKRQEALLPYLSSEEDRKKGKKFARYQFGDLLLHLEKKHGEDWGKVYDEAWERIDKKVEGLSKHIKLEEERRSEDAQSKAALTDWLRAKASFVIEGLKEADKDEFCRCELKLQKWYGDLRGKPFAIEAENSILDISGFSKQYNCAFIWQKDGVKKLNLYLIINYFKGGKLRFKKIKPEAFEANRFYTVINKKSGEIVPMEVNFNFDDPNLIILPLAFGKRQGREFIWNDLLSLETGSLKLANGRVIEKTLYNRRTRQDEPALFVALTFERREVLDSSNIKPMNLIGIDRGENIPAVIALTDPEGCPLSRFKDSLGNPTHILRIGESYKEKQRTIQAAKEVEQRRAGGYSRKYASKAKNLANDMVRNTARDLLYYAVTQDAMLIFENLSRGFGRQGKRTFMAERQYTRMEDWLTAKLAYEGLPSKTYLSKTLAQYTSKTCSNCGFTITSADYDRVLEKLKKTATGWMTTINGKELKVEGQITYYNRYKRQNVVKDLSVELDRLSEESVNNDISSWTKGRSGEALSLLKKRFSHRPVQEKFVCLNCGFETHADEQAALNIARSWLFLRSQEYKKYQTNKTTGNTDKRAFVETWQSFYRKKLKEVWKPAV

SEQ ID NO: 3955 - protein, 978 aa, Artificial Sequence
  CasX Protein Variant
MQEIKRINKIRRRLVKDSNTKKAGKTGPMKTLLVRVMTPDLRERLENLRKKPENIPQPISNTSRANLNKLLTDYTEMKKAILHVYWEEFQKDPVGLMSRVAQPAPKNIDQRKLIPVKDGNERLTSSGFACSQCCQPLYVYKLEQVNDKGKPHTNYFGRCNVSEHERLILLSPHKPEANDELVTYSLGKFGQRALDFYSIHVTRESNHPVKPLEQIGGNSCASGPVGKALSDACMGAVASFLTKYQDIILEHQKVIKKNEKRLANLKDIASANGLAFPKITLPPQPHTKEGIKAYNNVVAQIVIWVNLNLWQKLKIGRDEAKPLQRLKGFPSFPLVERQANEVDWWDMVCNVKKLINEKKEDGKVFWQNLAGYKRQEALLPYLSSEEDRKKGKKFARYQFGDLLLHLEKKHGEDWGKVYDEAWERIDKKVEGLSKHIKLEEERRSEDAQSKAALTDWLRAKASFVIEGLKEADKDEFCRCELKLQKWYGDLRGKPFAIEAENSILDISGFSKQYNCAFIWQKDGVKKLNLYLIINYFKGGKLRFKKIKPEAFEANRFYTVINKKSGEIVPMEVNFNFDDPNLIILPLAFGKRQGREFIWNDLLSLETGSLKLANGRVIEKTLYNRRTRQDEPALFVALTFERREVLDSSNIKPMNLIGIDRGENIPAVIALTDPEGCPLSRFKDSLGNPTHILRIGESYKEKQRTIQAAKEVEQRRAGGYSRKYASKAKNLADDMVRNTARDLLYYAVTQDAMLIFENLSRGFGRQGKRTFMAERQYTRMEDWLTAKLAYEGLPSKTYLSKTLAQYTSKTCSNCGFTITSADYDRVLEKLKKTATGWMTTINGKELKVEGQITYYNRYKRQNVVKDLSVELDRLSEESVNNDISSWTKGRSGEALSLLKKRFSHRPVQEKFVCLNCGFETHADEQAALNIARSWLFLRSQEYKKYQTNKTTGNTDKRAFVETWQSFYRKKLKEVWKPAV

SEQ ID NO: 3956 - protein, 978 aa, Artificial Sequence
  CasX Protein Variant
MQEIKRINKIRRRLVKDSNTKKAGKTGPMKTLLVRVMTPDLRERLENLRKKPENIPQPISNTSRANLNKLLTDYTEMKKAILHVYWEEFQKDPVGLMSRVAQPAPKNIDQRKLIPVKDGNERLTSSGFACSQCCQPLYVYKLEQVNDKGKPHTNYFGRCNVSEHERLILLSPHKPEANDELVTYSLGKFGQRALDFYSIHVTRESNHPVKPLEQIGGNSCASGPVGKALSDACMGAVASFLTKYQDIILEHQKVIKKNEKRLANLKDIASANGLAFPKITLPPQPHTKEGIEAYNNVVAQIVIWVNLNLWQKLKIGRDEAKPLQRLKGFPSFPLVERQANEVDWWDMVCNVKKLINEKKEDGKVFWQNLAGYKRQEALLPYLSSEEDRKKGKKFARYQFGDLLLHLEKKHGEDWGKVYDEAWERIDKKVEGLSKHIKLEEERRSEDAQSKAALTDWLRAKASFVIEGLKEADKDEFCRCELKLQKWYGDLRGKPFAIEAENSILDISGFSKQYNCAFIWQKDGVKKLNLYLIINYFKGGKLRFKKIKPEAFEANRFYTVINKKSGEIVPMEVNFNFDDPNLIILPLAFGKRQGREFIWNDLLSLETGSLKLANGRVIEKTLYNRRTRQDEPALFVALTFERREVLDSSNIKPMNLIGIDRGENIPAVIALTDPEGCPLSRFKDSLGNPTHILRIGESYKEKQRTIQAAKEVEQRRAGGYSRKYASKAKNLADDMVRNTARDLLYYAVTQDAMLIFENLSRGFGRQGKRTFMAERQYTRMEDWLTAKLAYEGLPRKTLLSKTLAQYTSKTCSNCGFTITSADYDRVLEKLKKTATGWMTTINGKELKVEGQITYYNRYKRQNVVKDLSVELDRLSEESVNNDISSWTKGRSGEALSLLKKRFSHRPVQEKFVCLNCGFETHADEQAALNIARSWLFLRSQEYKKYQTNKTTGNTDKRAFVETWQSFYRKKLKEVWKPAV

SEQ ID NO: 3957 - protein, 978 aa, Artificial Sequence
  CasX Protein Variant
MQEIKRINKIRRRLVKDSNTKKAGKTGPMKTLLVRVMTPDLRERLENLRKKPENIPQPISNTSRANLNKLLTDYTEMKKAILHVYWEEFQKDPVGLMSRVAQPAPKNIDQRKLIPVKDGNERLTSSGFACSQCCQPLYVYKLEQVNDKGKPHTNYFGRCNVSEHERLILLSPHKPEANDELVTYSLGKFGQRALDFYSIHVTRESNHPVKPLEQIGGNSCASGPVGKALSDACMGAVASFLTKYQDIILEHQKVIKKNEKRLANLKDIASANGLAFPKITLPPQPHTKEGIEAYNNVVAQIVIWVNLNLWQKLKIGRDEAKPLQRLKGFPSFPLVERQANEVDWWDMVCNVKKLINEKKEDGKVFWQNLAGYKRQEALLPYLSSEEDRKKGKKFARYQFGDLLLHLEKKHGEDWGKVYDEAWERIDKKVEGLSKHIKLEEERRSEDAQSKAALTDWLRAKASFVIEGLKEADKDEFCRCELKLQKWYGDLRGKPFAIEAENSILDISGFSKQYNCAFIWQKDGVKKLNLYLIINYFKGGKLRFKKIKPEAFEANRFYTVINKKSGEIVPMEVNFNFDDPNLIILPLAFGKRQGREFIWNDLLSLETGSLKLANGRVIEKTLYNRRTRQDEPALFVALTFERREVLDSSNIKPMNLIGIDRGENIPAVIALTDPEGCPLSRFKDSLGNPTHILRIGESYKEKQRTIQAAKEVEQRRAGGYSRKYASKAKNLADDMVRNTARDLLYYAVTQDAMLIFENLSRGFGRQGKRTFMAERQYTRMEDWLTAKLAYEMLPSKTYLSKTLAQYTSKTCSNCGFTITSADYDRVLEKLKKTATGWMTTINGKELKVEGQITYYNRYKRQNVVKDLSVELDRLSEESVNNDISSWTKGRSGEALSLLKKRFSHRPVQEKFVCLNCGFETHADEQAALNIARSWLFLRSQEYKKYQTNKTTGNTDKRAFVETWQSFYRKKLKEVWKPAV

SEQ ID NO: 3958 - protein, 978 aa, Artificial Sequence
  CasX Protein Variant
MQEIKRINKIRRRLVKDSNTKKAGKTGPMKTLLVRVMTPDLRERLENLRKKPENIPQPISNTSRANLNKLLTDYTEMKKAILHVYWEEFQKDPVGLMSRVAQPAPKNIDQRKLIPVKDGNERLTSSGFACSQCCQPLYVYKLEQVNDKGKPHTNYFGRCNVSEHERLILLSPHKPEANDELVTYSLGKFGQRALDFYSIHVTRESNHPVKPLEQIGGNSCASGPVGKALSDACMGAVASFLTKYQDIILEHQKVIKKNEKRLANLKDIASANGLAFPKITLPPQPHTKEGIEAYNNVVAQIVKWVNLNLWQKLKIGRDEAKPLQRLKGFPSFPLVERQANEVDWWDMVCNVKKLINEKKEDGKVFWQNLAGYKRQEALLPYLSSEEDRKKGKKFARYQFGDLLLHLEKKHGEDWGKVYDEAWERIDKKVEGLSKHIKLEEERRSEDAQSKAALTDWLRAKASFVIEGLKEADKDEFCRCELKLQKWYGDLRGKPFAIEAENSILDISGFSKQYNCAFIWQKDGVKKLNLYLIINYFKGGKLRFKKIKPEAFEANRFYTVINKKSGEIVPMEVNFNFDDPNLIILPLAFGKRQGREFIWNDLLSLETGSLKLANGRVIEKTLYNRRTRQDEPALFVALTFERREVLDSSNIKPMNLIGIDRGENIPAVIALTDPEGCPLSRFKDSLGNPTHILRIGESYKEKQRTIQAAKEVEQRRAGGYSRKYASKAKNLADDMVRNTARDLLYYAVTQDAMLIFENLSRGFGRQGKRTFMAERQYTRMEDWLTAKLAYEGLPSKTYLSKTLAQYTSKTCSNCGFTITSADYDRVLEKLKKTATGWMTTINGKELKVEGQITYYNRYKRQNVVKDLSVELDRLSEESVNNDISSWTKGRSGEALSLLKKRFSHRPVQEKFVCLNCGFETHADEQAALNIARSWLFLRSQEYKKYQTNKTTGNTDKRAFVETWQSFYRKKLKEVWKPAV

SEQ ID NO: 3959 - protein, 980 aa, Artificial Sequence
  CasX Protein Variant
MQEIKRINKIRRRLVKDSNTKKAGKTGPMKTLLVRVMTPDLRERLENLRKKPENIPQPISNTSRANLNKLLTDYTEMKKAILHVYWEEFQKDPVGLMSRVAQPAPKNIDQRKLIPVKDGNERLTSSGFACSQCCQPLYVYKLEQVNDKGKPHTNYFGRCNVSEHERLILLSPHKPEANDELVTYSLGKFGQRALDFYSIHVTRESNHPVKPLEQIGGNSCASGPVGKALSDACMGAVASFLTKYQDIILEHQKVIKKNEKRLANLKDIASANGLAFPKITLPPQPHTKEGIEAYNNVVAQIVIWVNLNLWQKLKIGRDEAKPLQRLKGFPSFPLVERQANEVDWWDMVCNVKKLINEKKEDGKVFWQNLAGYKRQEALLPYLSSEEDRKKGKKFARYQFGDLLLHLEKKHGEDWGKVYDEAWERIDKKVEGLSKHIKLEEERRSEDAQSKAALTDWLRAKASFVIEGLKEADKDEFCRCELKLQKWYGDLRGKPFAIEAENSILDISGFSKQYNCAFIWQKDGVKKLNLYLIINYFKGGKLRFKKIKPEAFEANRFYTVINKKSGEIVPMEVNFNFDDPNLIILPLAFGKRQGREFIWNDLLSLETGSLKLANGRVIEKTLYNRRTRQDEPALFVALTFERREVLDSSNIKPMNLIGIDRGENIPAVIALTDPEGCPLSRFKDSLGNPTHILRIGESYKEKQRTIQAAKEVEQRRAGGYSRKYASKAKNLADDMVRNTARDLLYYAVTQDAMLIFENLSRGFGRQGKRTFMAERQYTRMEDWLTAKLAYEGLASPSKTYLSKTLAQYTSKTCSNCGFTITSADYDRVLEKLKKTATGWMTTINGKELKVEGQITYYNRYKRQNVVKDLSVELDRLSEESVNNDISSWTKGRSGEALSLLKKRFSHRPVQEKFVCLNCGFETHADEQAALNIARSWLFLRSQEYKKYQTNKTTGNTDKRAFVETWQSFYRKKLKEVWKPAV

SEQ ID NO: 3960 - protein, 978 aa, Artificial Sequence
  CasX Protein Variant
MQEIKRINKIRRRLVKDSNTKKAGKTGPMKTLLVRVMTPDLRERLENLRKKPENIPQPISNTSRANLNKLLTDYTEMKKAILHVYWEEFQKDPVGLMSRVAQPAPKNIDQRKLIPVKDGNERLTSSGFACSQCCQPLYVYKLEQVNDKGKPHTNYFGRCNVSEHERLILLSPHKPEANDELVTYSLGKFGQRALDFYSIHVTRESNHPVKPLEQIGGNSCASGPVGKALSDACMGAVASFLTKYQDIILEHQKVIKKNEKRLANLKDIASANGLAFPKITLPPQPHTKEGIEAYNNVVAQIVIWVNLNLWQKLKIGRDEAKPLQRLKGFPSFPLVERQANEVDWWDMVCNVKKLINEKKEDGKVFWQNLAGYKRQEALLPYLSSEEDRKKGKKFARYQFGDLLLHLEKKHGEDWGKVYDEAWERIDKKVEGLSKHIKLEEERRSEDAQSKAALTDWLRAKASFVIEGLKEADKDEFCRCELKLQKWYGDLRGKPFAIEAENSILDISGFSKQYNCAFIWQKDGVKKLNLYLIINYFKGGKLRFKKIKPEAFEANRFYTVINKKSGEIVPMEVNFNFDDPNLIILPLAFGKRQGREFIWNDLLGLETGSLKLANGRVIEKTLYNRRTRQDEPALFVALTFERREVLDSSNIKPMNLIGIDRGENIPAVIALTDPEGCPLSRFKDSLGNPTHILRIGESYKEKQRTIQAAKEVEQRRAGGYSRKYASKAKNLADDMVRNTARDLLYYAVTQDAMLIFENLSRGFGRQGKRTFMAERQYTRMEDWLTAKLAYEGLPSKTYLSKTLAQYTSKTCSNCGFTITSADYDRVLEKLKKTATGWMTTINGKELKVEGQITYYNRYKRQNVVKDLSVELDRLSEESVNNDISSWTKGRSGEALSLLKKRFSHRPVQEKFVCLNCGFETHADEQAALNIARSWLFLRSQEYKKYQTNKTTGNTDKRAFVETWQSFYRKKLKEVWKPAV

SEQ ID NO: 3961 - protein, 978 aa, Artificial Sequence
  CasX Protein Variant
MQEIKRINKIRRRLVKDSNTKKAGKTGPMKTLLVRVMTPDLRERLENLRKKPENIPQPISNTSRANLNKLLTDYTEMKKAILHVYWEEFQKDPVGLMSRVAQPAPKNIDQRKLIPVKDGNERLTSSGFACSQCCQPLYVYKLEQVNDKGKPHTNYFGRCNVSEHERLILLSPHKPEANDELVTYSLGKFGQRALDFYSIHVTRESNHPVKPLEQIGGNSCASGPVGKALSDACMGAVASFLTKYQDIILEHQKVIKKNEKRLANLKDIASANGLAFPKITLPPQPHTKEGIEAYNNVVAQIVIWVNLNLWQKLKIGRDEAKPLQRLKGFPSFPLVERQANEVDWWDMVCNVKKLINEKKEDGKVFWQNLAGYKRQEALLPYLSSEEDRKKGKKFARYQFGDLLLHLEKKHGEDWGKVYDEAWERIDKKVEGLSKHIKLEEERRSEDAQSKAALTDWLRAKASFVIEGLKEADKDEFCRCELKLQKWYGDLRGKPFAIEAENSILDISGFSKQYNCAFIWQKDGVKKLNLYLIINYFKGGKLRFKKIKPEAFEANRFYTVINKKSGEIVPMEVNFNFDDPNLIILPLAFGKRQGREFIWNDLLSLETGSLKLANGRVIEKTLYNRRTRQDEPALFVALTFERREVLDSSNIKPMNLIGIDRGENIPAVIALTDPEGCPLSRFKDSLGNPTHILRIGESYKEKQRTIQAAKEVEQRRAGGYSRKYASKAKNLADDMVRNTARDLLYYAVTQDAMLIFENLSRGFGRQGKRTFMAERQYTRMEDWLTAKLAYEGLPSKTLLSKTLAQYTSKTCSNCGFTITSADYDRVLEKLKKTATGWMTTINGKELKVEGQITYYNRYKRQNVVKDLSVELDRLSEESVNNDISSWTKGRSGEALSLLKKRFSHRPVQEKFVCLNCGFETHADEQAALNIARSWLFLRSQEYKKYQTNKTTGNTDKRAFVETWQSFYRKKLKEVWKPAV

SEQ ID NO: 3962 - protein, 978 aa, Artificial Sequence
  CasX Protein Variant
MQEIKRINKIRRRLVKDSNTKKAGKTGPMKTLLVRVMTPDLRERLENLRKKPENIPQPISNTSRANLNKLLTDYTEMKKAILHVYWEEFQKDPVGLMSRVAQPAPKNIDQRKLIPVKDGNERLTSSGFACSQCCQPLYVYKLEQVNDKGKPHTNYFGRCNVSEHERLILLSPHKPEANDELVTYSLGKFGQRALDFYSIHVTRESNHPVKPLEQIGGNSCASGPVGKALSDACMGAVASFLTKYQDIILEHQKVIKKNEKRLANLKDIASANGLAFPKITLPPQPHTKEGIEAYNNVVAQIVIWVNLNLWQKLKIGRDEAKPLQRLKGFPSFPLVERQANEVDWWDMVCNVKKLINEKKEDGKVFWQNLAGYKRQEKLLPYLSSEEDRKKGKKFARYQFGDLLLHLEKKHGEDWGKVYDEAWERIDKKVEGLSKHIKLEEERRSEDAQSKAALTDWLRAKASFVIEGLKEADKDEFCRCELKLQKWYGDLRGKPFAIEAENSILDISGFSKQYNCAFIWQKDGVKKLNLYLIINYFKGGKLRFKKIKPEAFEANRFYTVINKKSGEIVPMEVNFNFDDPNLIILPLAFGKRQGREFIWNDLLSLETGSLKLANGRVIEKTLYNRRTRQDEPALFVALTFERREVLDSSNIKPMNLIGIDRGENIPAVIALTDPEGCPLSRFKDSLGNPTHILRIGESYKEKQRTIQAAKEVEQRRAGGYSRKYASKAKNLADDMVRNTARDLLYYAVTQDAMLIFENLSRGFGRQGKRTFMAERQYTRMEDWLTAKLAYEGLPSKTYLSKTLAQYTSKTCSNCGFTITSADYDRVLEKLKKTATGWMTTINGKELKVEGQITYYNRYKRQNVVKDLSVELDRLSEESVNNDISSWTKGRSGEALSLLKKRFSHRPVQEKFVCLNCGFETHADEQAALNIARSWLFLRSQEYKKYQTNKTTGNTDKRAFVETWQSFYRKKLKEVWKPAV

SEQ ID NO: 3963 - protein, 978 aa, Artificial Sequence
  CasX Protein Variant
MQEIKRINKIRRRLVKDSNTKKAGKTGPMKTLLVRVMTPDLRERLENLRKKPENIPQPISNTSRANLNKLLTDYTEMKKAILHVYWEEFQKDPVGLMSRVAQPAPKNIDQRKLIPVKDGNERLTSSGFACSQCCQPLYVYKLEQVNDKGKPHTNYFGRCNVSEHERLILLSPHKPEANDELVTYSLGKFGQRALDFYSIHVTRESNHPVKPLEQIGGNSCASGPVGKALSDACMGAVASFLTKYQDIILEHQKVIKKNEKRLANLKDIASANGLAFPKITLPPQPHTKEGIEAYNNVVAQIVIWVNLNLWQKLKIGRDEAKPLQRLKGFPSFPLVERQANEVDWWDMVCNVKKLINEKKEDGKVFWQNLAGYKRQEALLPYLSSEEDRKKGKKFARYQFGDLLLHLEKKHGEDWGKVYDEAWERIDKKVEGLSKHIKLEEERRSEDAQSKAALTDWLRAKASFVIEGLKEADKDEFCRCELKLQKWYGDLRGKPFAIEAENSILDISGFSKQYNCAFIWQKDGVKKLNLYLIINYFKGGKLRFKKIKPEAFEANRFYTVINKKSGEIVPMEVNFNFDDPNLIILPLAFGKRQGREFIWNDLLSLETGSLKLANGRVIEKTLYNRRTRQDEPALFVALTFERREVLDSSNIKPMNLIGIDRGENIPAVIALTDPEGCPLSRFKDSLGNPTHILRIGESYKEKQRTIQAAKEVEQRRAGGYSRKYASKAKNLADDMVRNTARDLLYYAVTQDAMLIFENLSRGFGRQGKRTFMAERQYTRMEDWLTAKLAYEGLPSKTYLSKTLAQYTSKTCSNCGFTITSADYDRVLEKLKKTATGWMTTINGKELKVEGQITYYNRYKRQNVVKDLSVELDRLSEESVNNDISSWTKGRSGEALSLLKKRFSHRPVQEKFVCLNCGFETHADEQAALNIARSWLFLRSQEYKKYQTNKTTGNTDRRAFVETWQSFYRKKLKEVWKPAV

SEQ ID NO: 3964 - protein, 978 aa, Artificial Sequence
  CasX Protein Variant
MQEIKRINKIRRRLVKDSNTKKAGKTGPMKTLLVRVMTPDLRERLENLRKKPENIPQPISNTSRANLNKLLTDYTEMKKAILHVYWEEFQKDPVGLMSRVAQPAPKNIDQRKLIPVKDGNERLTSSGFACSQCCQPLYVYKLEQVNDKGKPHTNYFGRCNVSEHERLILLSPHKPEANDELVTYSLGKFGQRALDFYSIHVTRESNHPVKPLEQIGGNSCASGPVGKALSDACMGAVASFLTKYQDIILEHQKVIKKNEKRLANLKDIASANGLAFPKITLPPQPHTKEGIEAYNNVVAQIVIWVNLNLWQKLKIGRDEAKPLQRLKGFPSFPLVERQANEVDWWDMVCNVKKLINEKKEDGKVFWQNLAGYKRQEALLPYLSSEEDRKKGKKFARYQFGDLLLHLEKKHGEDWGKVYDEAWERIDKKVEGLSKHIKLEEERRSEDAQSKAALTDWLRAKASFVIEGLKEADKDEFCRCELKLQKWYGDLRGKPFAIEAENSILDISGFSKQYNCAFIWQKDGVKKLNLYLIINYFKGGKLRFKKIKPEAFEANRFYTVINKKSGEIVPMEVNFNFDDPNLIILPLAFGKRQGREFIWNDLLSLETGSLKLANGRVIEKTLYNRRTRQDEPALFVALTFERREVLDSSNIKPMNLIGIDRGENIPAVIALTDPEGCPLSRFKDSLGNPTHILRIGESYKEKQRTIQAAKEVEQRRAGGYSRKYASKAKNLADDMVRNTARDLLYYAVTQDAMLIFENLSRGFGRQGKRTFMAERQYTRMEDWLTAKLAYEGLPSKTYLSKTLAQYTSKTCSNCGFTITSADYDRVLEKLKKTATGWMTTINGKELKVEGQITYYNRYKRQNVVKDLSVELDRLSEESVNNDISSWKKGRSGEALSLLKKRFSHRPVQEKFVCLNCGFETHADEQAALNIARSWLFLRSQEYKKYQTNKTTGNTDKRAFVETWQSFYRKKLKEVWKPAV

SEQ ID NO: 3965 - protein, 978 aa, Artificial Sequence
  CasX Protein Variant
MQEIKRINKIRRRLVKDSNTKKAGKTGPMKTLLVRVMTPDLRERLENLRKKPENIPQPISNTSRANLNKLLTDYTEMKKAILHVYWEEFQKDPVGLMSRVAQPAPKNIDQRKLIPVKDGNERLTSSGFACSQCCQPLYVYKLEQVNDKGKPHTNYFGRCNVSEHERLILLSPHKPEANDELVTYSLGKFGQRALDFYSIHVTRESNHPVKPLEQIGGNSCASGPVGKALSDACMGAVASFLTKYQDIILEHQKVIKKNEKRLANLKDIASANGLAFPKITLPPQPHTKEGIEAYNNVVAQIVIWVNLNLWQKLKIGRDEAKPLQRLKGFPSFPLVERRKNEVDWWDMVCNVKKLINEKKEDGKVFWQNLAGYKRQEALLPYLSSEEDRKKGKKFARYQFGDLLLHLEKKHGEDWGKVYDEAWERIDKKVEGLSKHIKLEEERRSEDAQSKAALTDWLRAKASFVIEGLKEADKDEFCRCELKLQKWYGDLRGKPFAIEAENSILDISGFSKQYNCAFIWQKDGVKKLNLYLIINYFKGGKLRFKKIKPEAFEANRFYTVINKKSGEIVPMEVNFNFDDPNLIILPLAFGKRQGREFIWNDLLSLETGSLKLANGRVIEKTLYNRRTRQDEPALFVALTFERREVLDSSNIKPMNLIGIDRGENIPAVIALTDPEGCPLSRFKDSLGNPTHILRIGESYKEKQRTIQAAKEVEQRRAGGYSRKYASKAKNLADDMVRNTARDLLYYAVTQDAMLIFENLSRGFGRQGKRTFMAERQYTRMEDWLTAKLAYEGLPSKTYLSKTLAQYTSKTCSNCGFTITSADYDRVLEKLKKTATGWMTTINGKELKVEGQITYYNRYKRQNVVKDLSVELDRLSEESVNNDISSWTKGRSGEALSLLKKRFSHRPVQEKFVCLNCGFETHADEQAALNIARSWLFLRSQEYKKYQTNKTTGNTDKRAFVETWQSFYRKKLKEVWKPAV

SEQ ID NO: 3966 - protein, 978 aa, Artificial Sequence
  CasX Protein Variant
MQEIKRINKIRRRLVKDSNTKKAGKTGPMKTLLVRVMTPDLRERLENLRKKPENIPQPISNTSRANLNKLLTDYTEMKKAILHVYWEEFQKDPVGLMSRVAQPAPKNIDQRKLIPVKDGNERLTSSGFACSQCCQPLYVYKLEQVNDKGKPHTNYFGRCNVSEHERLILLSPHKPEANDELVTYSLGKFGQRALDFYSIHVTRESNHPVKPLEQIGGNSCASGPVGKALSDACMGAVASFLTKYQDIILEHQKVIKKNEKRLANLKDIASANGLAFPKITLPQQPHTKEGIEAYNNVVAQIVIWVNLNLWQKLKIGRDEAKPLQRLKGFPSFPLVERQANEVDWWDMVCNVKKLINEKKEDGKVFWQNLAGYKRQEALLPYLSSEEDRKKGKKFARYQFGDLLLHLEKKHGEDWGKVYDEAWERIDKKVEGLSKHIKLEEERRSEDAQSKAALTDWLRAKASFVIEGLKEADKDEFCRCELKLQKWYGDLRGKPFAIEAENSILDISGFSKQYNCAFIWQKDGVKKLNLYLIINYFKGGKLRFKKIKPEAFEANRFYTVINKKSGEIVPMEVNFNFDDPNLIILPLAFGKRQGREFIWNDLLSLETGSLKLANGRVIEKTLYNRRTRQDEPALFVALTFERREVLDSSNIKPMNLIGIDRGENIPAVIALTDPEGCPLSRFKDSLGNPTHILRIGESYKEKQRTIQAAKEVEQRRAGGYSRKYASKAKNLADDMVRNTARDLLYYAVTQDAMLIFENLSRGFGRQGKRTFMAERQYTRMEDWLTAKLAYEGLPSKTYLSKTLAQYTSKTCSNCGFTITSADYDRVLEKLKKTATGWMTTINGKELKVEGQITYYNRYKRQNVVKDLSVELDRLSEESVNNDISSWTKGRSGEALSLLKKRFSHRPVQEKFVCLNCGFETHADEQAALNIARSWLFLRSQEYKKYQTNKTTGNTDKRAFVETWQSFYRKKLKEVWKPAV

SEQ ID NO: 3967 - protein, 978 aa, Artificial Sequence
  CasX Protein Variant
MQEIKRINKIRRRLVKDSNTKKAGKTGPMKTLLVRVMTPDLRERLENLRKKPENIPQPISNTSRANLNKLLTDYTEMKKAILHVYWEEFQKDPVGLMSRVAQPAPKNIDQRKLIPVKDGNERLTSSGFACSQCCQPLYVYKLEQVNDKGKPHTNYFGRCNVSEHERLILLSPHKPEANDELVTYSLGKFGQRALDFYSIHVTRESNHPVKPLEQIGGNSCASGPVGKALSDACMGAVASFLTKYQDIILEHQKVIKKNEKRLANLKDIASANGLAFPKITLPPQPHTKEGIEAYNNVVAQIVIWVNLNLWQKLKIGRDEAKPLQRLKGFPSFPLVERQANEVDWWDMVCNVKKLINEKKEDGKVFWQNLAGYKRQEALLPYLSSEEDRKKGKKFARYQFGDLLLHLEKKHGEDWGKVYDEAWERIDKKVEGLSKHIKLEEERRSEDAQSKAALTDWLRAKASFVIEGLKEADKDEFCRCELKLQKWYGDLRGKPFAIEAENSILDISGFSKQYNCAFIWQKDGVKKLNLYLIINYFKGGKLRFKKIKPEAFEANRFYTVINKKSGEIVPMEVNFNFDDPNLIILPLAFGKRQGREFIWNNLLSLETGSLKLANGRVIEKTLYNRRTRQDEPALFVALTFERREVLDSSNIKPMNLIGIDRGENIPAVIALTDPEGCPLSRFKDSLGNPTHILRIGESYKEKQRTIQAAKEVEQRRAGGYSRKYASKAKNLADDMVRNTARDLLYYAVTQDAMLIFENLSRGFGRQGKRTFMAERQYTRMEDWLTAKLAYEGLPSKTYLSKTLAQYTSKTCSNCGFTITSADYDRVLEKLKKTATGWMTTINGKELKVEGQITYYNRYKRQNVVKDLSVELDRLSEESVNNDISSWTKGRSGEALSLLKKRFSHRPVQEKFVCLNCGFETHADEQAALNIARSWLFLRSQEYKKYQTNKTTGNTDKRAFVETWQSFYRKKLKEVWKPAV

SEQ ID NO: 3968 - protein, 978 aa, Artificial Sequence
  CasX Protein Variant
MQEIKRINKIRRRLVKDSNTKKAGKTGPMKTLLVRVMTPDLRERLENLRKKPENIPQPISNTSRANLNKLLTDYTEMKKAILHVYWEEFQKDPVGLMSRVAQPAPKNIDQRKLIPVKDGNERLTSSGFACSQCCQPLYVYKLEQVNDKGKPHTNYFGRCNVSEHERLILLSPHKPEANDELVTYSLGKFGQRALDFYSIHVTRESNHPVKPLEQIGGNSCASGPVGKALSDACMGAVASFLTKYQDIILEHQKVIKKNEKRLANLKDIASANGLAFPKITLPPQPHTKEGIEAYNNVVAQIVIWVNLNLWQKLKIGRDEAKPLQRLKGFPSFPLVERQANEVDWWDMVCNVKKLINEKKEDGKVFWQNLAGYKRQEALLPYLSSEEDRKKGKKFARYQFGDLLLHLEKKHGEDWGKVYDEAWERIDKKVEGLSKHIKLEEERRSEDAQSKAALTDWLRAKASFVIEGLKEADKDEFCRCELKLQKWYGDLRGKPFAIEAENSILDISGFSKQYNCAFIWQKDGVKKLNLYLIINYFKGGKLRFKKIKPEAFEANRFYTVINKKSGEIVPMEVNFNFDDPNLIILPLAFGKRQGREFIWNDLLSLETGSLKLANGRVIEKTLYNRRTRQDEPALFVALTFERREVLDSSNIKPMNLIGIDRGENIPAVIALTDPEGCPLSRFKDSLGNPTHILRIGESYKEKQRTIQAAKEVEQRRAGGYSRKYASKAKNLADDMVRNTARDLLYYAVTQDAMLIFENLSRGFGRQGKRTFMAERQYTRMEDWLTAKLAYEGLPSKTYLSKTLAQYTSKTCSNCGFTITSADYDRVLEKLKKTATGWMTTINGKELKVEGQITYYNRYKRQNVVKDLRVELDRLSEESVNNDISSWTKGRSGEALSLLKKRFSHRPVQEKFVCLNCGFETHADEQAALNIARSWLFLRSQEYKKYQTNKTTGNTDKRAFVETWQSFYRKKLKEVWKPAV

SEQ ID NO: 3969 - protein, 978 aa, Artificial Sequence
  CasX Protein Variant
MQEIKRINKIRRRLVKDSNTKKAGKTGPMKTLLVRVMTPDLRERLENLRKKPENIPQPISNTSRANLNKLLTDYTEMKKAILHVYWEEFQKDPVGLMSRVAQPAPKNIDQRKLIPVKDGNERLTSSGFACSQCCQPLYVYKLEQVNDKGKPHTNYFGRCNVSEHERLILLSPHKPEANDELVTYSLGKFGQRALDFYSIHVTRESNHPVKPLEQIGGNSCASGPVGKALSDACMGAVASFLTKYQDIILEHQKVIKKNEKRLANLKDIASANGLAFPKITLPPQPHTKEGIEAYNNVVAQIVIWVNLNLWQKLKIGRDEAKPLQRLKGFPSFPLVERQANEVDWWDMVCNVKKLINEKKEDGKVFWQNLAGYKRQEALLPYLSSEEDRKKGKKFARYQFGDLLLHLEKKHGEDWGKVYDEAWERIDKKVEGLSKHIKLEEERRSEDAQSKAALTDWLRAKASFVIHGLKEADKDEFCRCELKLQKWYGDLRGKPFAIEAENSILDISGFSKQYNCAFIWQKDGVKKLNLYLIINYFKGGKLRFKKIKPEAFEANRFYTVINKKSGEIVPMEVNFNFDDPNLIILPLAFGKRQGREFIWNDLLSLETGSLKLANGRVIEKTLYNRRTRQDEPALFVALTFERREVLDSSNIKPMNLIGIDRGENIPAVIALTDPEGCPLSRFKDSLGNPTHILRIGESYKEKQRTIQAAKEVEQRRAGGYSRKYASKAKNLADDMVRNTARDLLYYAVTQDAMLIFENLSRGFGRQGKRTFMAERQYTRMEDWLTAKLAYEGLPSKTYLSKTLAQYTSKTCSNCGFTITSADYDRVLEKLKKTATGWMTTINGKELKVEGQITYYNRYKRQNVVKDLSVELDRLSEESVNNDISSWTKGRSGEALSLLKKRFSHRPVQEKFVCLNCGFETHADEQAALNIARSWLFLRSQEYKKYQTNKTTGNTDKRAFVETWQSFYRKKLKEVWKPAV

SEQ ID NO: 3970 - protein, 978 aa, Artificial Sequence
  CasX Protein Variant
MQEIKRINKIRRRLVKDSNTKKAGKTGPMKTLLVRVMTPDLRERLENLRKKPKNIPQPISNTSRANLNKLLTDYTEMKKAILHVYWEEFQKDPVGLMSRVAQPAPKNIDQRKLIPVKDGNERLTSSGFACSQCCQPLYVYKLEQVNDKGKPHTNYFGRCNVSEHERLILLSPHKPEANDELVTYSLGKFGQRALDFYSIHVTRESNHPVKPLEQIGGNSCASGPVGKALSDACMGAVASFLTKYQDIILEHQKVIKKNEKRLANLKDIASANGLAFPKITLPPQPHTKEGIEAYNNVVAQIVIWVNLNLWQKLKIGRDEAKPLQRLKGFPSFPLVERQANEVDWWDMVCNVKKLINEKKEDGKVFWQNLAGYKRQEALLPYLSSEEDRKKGKKFARYQFGDLLLHLEKKHGEDWGKVYDEAWERIDKKVEGLSKHIKLEEERRSEDAQSKAALTDWLRAKASFVIEGLKEADKDEFCRCELKLQKWYGDLRGKPFAIEAENSILDISGFSKQYNCAFIWQKDGVKKLNLYLIINYFKGGKLRFKKIKPEAFEANRFYTVINKKSGEIVPMEVNFNFDDPNLIILPLAFGKRQGREFIWNDLLSLETGSLKLANGRVIEKTLYNRRTRQDEPALFVALTFERREVLDSSNIKPMNLIGIDRGENIPAVIALTDPEGCPLSRFKDSLGNPTHILRIGESYKEKQRTIQAAKEVEQRRAGGYSRKYASKAKNLADDMVRNTARDLLYYAVTQDAMLIFENLSRGFGRQGKRTFMAERQYTRMEDWLTAKLAYEGLPSKTYLSKTLAQYTSKTCSNCGFTITSADYDRVLEKLKKTATGWMTTINGKELKVEGQITYYNRYKRQNVVKDLSVELDRLSEESVNNDISSWTKGRSGEALSLLKKRFSHRPVQEKFVCLNCGFETHADEQAALNIARSWLFLRSQEYKKYQTNKTTGNTDKRAFVETWQSFYRKKLKEVWKPAV

SEQ ID NO: 3971 - protein, 978 aa, Artificial Sequence
  CasX Protein Variant
MQEIKRINKIRRRLVKDSNTKKAGKTGPMKTLLVRVMTPDLRERLENLRKKPENIPQPISNTSRANLNKLLTDYTEMKKAILHVYWEEFQKDPVGLMSRVAQPAPKNIDQRKLIPVKDGNERLTSSGFACSQCCQPLYVYKLEQVNDKGKPHTNYFGRCNVSEHERLILLSPHKPEANDELVTYSLGKFGQRALDFYSIHVTRESNHPVKPLEQIGGNSCASGPVGKALSDACMGAVASFLTKYQDIILEHQKVIKKNEKRLANLKDIASANGLAFPKITLPPQPHTKEGIEAYNNVVAQIVIWVNLNLWQKLKIGRDEAKPLQRLKGFPSFPLVERQANEVDWWDMVCNVKKLINEKKEDGKVFWQNLAGYKRQEALLPYLSSEEDRKKGKKFARYQFGDLLLHLEKKHGEDWGKVYDEAWERIDKKVEGLSKHIKLEEERRSEDAQSKAALTDWLRAKASFVIEGLKEADKDEFCRCELKLQKWYGDLRGKPFAIEAENSILDISGFSKQYNCAFIWQKDGVKKLNLYLIINYFKGGKLRFKKIKPEAFEANRFYTVINKKSGEIVPMEVNFNFDDPNLIILPLAFGKRQGREFIWNDLLSLETGSLKLANGRVIEKTLYNRRTRQDEPALFVALTFERREVLDSSNIKPMNLIGIDRGENIPAVIALTDPEGCPLSRFKDSLGNPTHILRIGESYKEKQRTIQAAKEVEQRRAGGYSRKYASKAKNLADDMVRNTARDLLYYAVTQDAMLIFENLSRGFGRQGKRTFMAERQYTRMEDWLTAKLAYEGEPSKTYLSKTLAQYTSKTCSNCGFTITSADYDRVLEKLKKTATGWMTTINGKELKVEGQITYYNRYKRQNVVKDLSVELDRLSEESVNNDISSWTKGRSGEALSLLKKRFSHRPVQEKFVCLNCGFETHADEQAALNIARSWLFLRSQEYKKYQTNKTTGNTDKRAFVETWQSFYRKKLKEVWKPAV

SEQ ID NO: 3972 - protein, 978 aa, Artificial Sequence
  CasX Protein Variant
MQEIKRINKIRRRLVKDSNTKKAGKTGPMKTLLVRVMTPDLRERLENLRKKPENIPQPISNTSRANLNKLLTDYTEMKKAILHVYWEEFQKDPVGLMSRVAQPAPKNIDQRKLIPVKDGNERLTSSGFACSQCCQPLYVYKLEQVNDKGKPHTNYFGRCNVSEHERLILLSPHKPEANDELVTYSLGKFGQRALDFYSIHVTRESNHPVKPLEQIGGNSCASGPVGKALSDACMGAVASFLTKYQDIILEHQKVIKKNEKRLANLKDIASANGLAFPKITLPPQPHTKEGIEAYNNVVAQIVIWVNLNLWQKLKIGRDEAKPLQRLKGFPSFPLVERRANEVDWWDMVCNVKKLINEKKEDGKVFWQNLAGYKRQEALLPYLSSEEDRKKGKKFARYQFGDLLLHLEKKHGEDWGKVYDEAWERIDKKVEGLSKHIKLEEERRSEDAQSKAALTDWLRAKASFVIEGLKEADKDEFCRCELKLQKWYGDLRGKPFAIEAENSILDISGFSKQYNCAFIWQKDGVKKLNLYLIINYFKGGKLRFKKIKPEAFEANRFYTVINKKSGEIVPMEVNFNFDDPNLIILPLAFGKRQGREFIWNDLLSLETGSLKLANGRVIEKTLYNRRTRQDEPALFVALTFERREVLDSSNIKPMNLIGIDRGENIPAVIALTDPEGCPLSRFKDSLGNPTHILRIGESYKEKQRTIQAAKEVEQRRAGGYSRKYASKAKNLADDMVRNTARDLLYYAVTQDAMLIFENLSRGFGRQGKRTFMAERQYTRMEDWLTAKLAYEGLPSKTYLSKTLAQYTSKTCSNCGFTITSADYDRVLEKLKKTATGWMTTINGKELKVEGQITYYNRYKRQNVVKDLSVELDRLSEESVNNDISSWTKGRSGEALSLLKKRFSHRPVQEKFVCLNCGFETHADEQAALNIARSWLFLRSQEYKKYQTNKTTGNTDKRAFVETWQSFYRKKLKEVWKPAV

SEQ ID NO: 3973 - protein, 978 aa, Artificial Sequence
  CasX Protein Variant
MQEIKRINKIRRRLVKDSNTKKAGKTGPMKTLLVRVMTPDLRERLENLRKKPENIPQPISNTSRANLNKLLTDYTEMKKAILHVYWEEFQKDPVGLMSRVAQPAPKNIDQRKLIPVKDGNERLTSSGFACSQCCQPLYVYKLEQVNDKGKPDTNYFGRCNVSEHERLILLSPHKPEANDELVTYSLGKFGQRALDFYSIHVTRESNHPVKPLEQIGGNSCASGPVGKALSDACMGAVASFLTKYQDIILEHQKVIKKNEKRLANLKDIASANGLAFPKITLPPQPHTKEGIEAYNNVVAQIVIWVNLNLWQKLKIGRDEAKPLQRLKGFPSFPLVERQANEVDWWDMVCNVKKLINEKKEDGKVFWQNLAGYKRQEALLPYLSSEEDRKKGKKFARYQFGDLLLHLEKKHGEDWGKVYDEAWERIDKKVEGLSKHIKLEEERRSEDAQSKAALTDWLRAKASFVIEGLKEADKDEFCRCELKLQKWYGDLRGKPFAIEAENSILDISGFSKQYNCAFIWQKDGVKKLNLYLIINYFKGGKLRFKKIKPEAFEANRFYTVINKKSGEIVPMEVNFNFDDPNLIILPLAFGKRQGREFIWNDLLSLETGSLKLANGRVIEKTLYNRRTRQDEPALFVALTFERREVLDSSNIKPMNLIGIDRGENIPAVIALTDPEGCPLSRFKDSLGNPTHILRIGESYKEKQRTIQAAKEVEQRRAGGYSRKYASKAKNLADDMVRNTARDLLYYAVTQDAMLIFENLSRGFGRQGKRTFMAERQYTRMEDWLTAKLAYEGLPSKTYLSKTLAQYTSKTCSNCGFTITSADYDRVLEKLKKTATGWMTTINGKELKVEGQITYYNRYKRQNVVKDLSVELDRLSEESVNNDISSWTKGRSGEALSLLKKRFSHRPVQEKFVCLNCGFETHADEQAALNIARSWLFLRSQEYKKYQTNKTTGNTDKRAFVETWQSFYRKKLKEVWKPAV

SEQ ID NO: 3974 - protein, 978 aa, Artificial Sequence
  CasX Protein Variant
MQEIKRINKIRRRLVKDSNTKKAGKTGPMKTLLVRVMTPDLRERLENLRKKPENIPQPISNTSRANLNKLLTDYTEMKKAILHVYWEEFQKDPVGLMSRVAQPAPKNIDQRKLIPVKDGNERLTSSGFACSQCCQPLYVYKLEQVNDKGKPHTNYFGRCNVSEHERLILLSPHKPEANDELVTYSLGKFGQRALDFYSIHVTRESNHPVKPLEQIGGNSCASGPVGKALSDACMGAVASFLTKYQDIILEHQKGIKKNEKRLANLKDIASANGLAFPKITLPPQPHTKEGIEAYNNVVAQIVIWVNLNLWQKLKIGRDEAKPLQRLKGFPSFPLVERQANEVDWWDMVCNVKKLINEKKEDGKVFWQNLAGYKRQEALLPYLSSEEDRKKGKKFARYQFGDLLLHLEKKHGEDWGKVYDEAWERIDKKVEGLSKHIKLEEERRSEDAQSKAALTDWLRAKASFVIEGLKEADKDEFCRCELKLQKWYGDLRGKPFAIEAENSILDISGFSKQYNCAFIWQKDGVKKLNLYLIINYFKGGKLRFKKIKPEAFEANRFYTVINKKSGEIVPMEVNFNFDDPNLIILPLAFGKRQGREFIWNDLLSLETGSLKLANGRVIEKTLYNRRTRQDEPALFVALTFERREVLDSSNIKPMNLIGIDRGENIPAVIALTDPEGCPLSRFKDSLGNPTHILRIGESYKEKQRTIQAAKEVEQRRAGGYSRKYASKAKNLADDMVRNTARDLLYYAVTQDAMLIFENLSRGFGRQGKRTFMAERQYTRMEDWLTAKLAYEGLPSKTYLSKTLAQYTSKTCSNCGFTITSADYDRVLEKLKKTATGWMTTINGKELKVEGQITYYNRYKRQNVVKDLSVELDRLSEESVNNDISSWTKGRSGEALSLLKKRFSHRPVQEKFVCLNCGFETHADEQAALNIARSWLFLRSQEYKKYQTNKTTGNTDKRAFVETWQSFYRKKLKEVWKPAV

SEQ ID NO: 3975 - protein, 978 aa, Artificial Sequence
  CasX Protein Variant
MQEIKRINKIRRRLVKDSNTKKAGKTGPMKTLLVRVMTPDLRERLENLRKKPENIPQPISNTSRANLNKLLTDYTEMKKAILHVYWEEFQKDPVGLMSRVAQPAPKNIDQRKLIPVKDGNERLTSSGFACSQCCQPLYVYKLEQVNDKGKPHTNYFGRCNVSEHERLILLSPHKPEANDELVTYSLGKFGQRALDFYSIHVTRESNHPVKPLEQIGGNSCASGPVGKALSDACMGAVASFLTKYQDIILEHQKVIKKNEKRLANLKDIASANGLAFPKITLPPQPHTKEGIEAYNNVVAQIVIWVNLNLWQKLKIGRDEAKPLQRLKGFPSFPLVERQANEVDWWDMVCNVKKLINEKKEDGKVFWQNLAGYKRQEALLPYLSSEEDRKKGKKFARYQFGDLLLHLEKKHGEDWGKVYDEAWERIDKKVEGLSKHIKLEEERRSEDAQSKAALTDWLRAKASFVIEGLKEADKDEFCRCELKLQKWYGDLRGKPFAIEAENSILDISGFSKQYNCAFIWQKDGVKKLNLYLIINYFKGGKLRFKKIKPEAFEANRFYTVINKKSGEIVPMEVNFNFDDPNLIILPLAFGKRQGREFIWNDLLSLETGSLKLANGRVIEKTLYNRRTRQDEPALFVALTFERREVLDSSNIKPMNLIGIDRGENIPAVIALTDPEGCPLSRFKDSLGNPTHILRIGESYKEKQRTIQAAKEVEQRRAGGYSRKYASKAKNLADDMVRNTARDLLYYAVTQDAMLIFENLSRGFGRQGKRTFMAERQYTRMEDWLTAKLAYEGLPSKTYLSKTLAQYTSKTCSNCGFTITSADYDRVLEKLKKTATGWMTTINGKELKVEGQITYYNRYKRQNVVKDLSVELDRLSEESVNNDISSWTKGRSGEALSLLKKRFSHRPVQEKFVCLNCGFETHADEQAALNIARSWLFLRSQEYKKYQTNKPPGNTDKRAFVETWQSFYRKKLKEVWKPAV

SEQ ID NO: 3976 - protein, 978 aa, Artificial Sequence
  CasX Protein Variant
MQEIKRINKIRRRLVKDSNTKKAGKTGPMKTLLVRVMTPDLRERLENLRKKPENIPQPISNTSRANLNKLLTDYTEMKKAILHVYWEEFQKDPVGLMSRVAQPAPKNIDQRKLIPVKDGNERLTSSGFACSQCCQPLYVYKLEQVNDKGKPHTNYFGRCNVSEHERLILLSPHKPEANDELVTYSLGKFGQRALDFYSIHVTRESNHPVKPLEQIGGNSCASGPVGKALSDACMGAVASFLTKYQDIILEHQKVIKKNEKRLANLKDIASANGLAFPKFTLPPQPHTKEGIEAYNNVVAQIVIWVNLNLWQKLKIGRDEAKPLQRLKGFPSFPLVERQANEVDWWDMVCNVKKLINEKKEDGKVFWQNLAGYKRQEALLPYLSSEEDRKKGKKFARYQFGDLLLHLEKKHGEDWGKVYDEAWERIDKKVEGLSKHIKLEEERRSEDAQSKAALTDWLRAKASFVIEGLKEADKDEFCRCELKLQKWYGDLRGKPFAIEAENSILDISGFSKQYNCAFIWQKDGVKKLNLYLIINYFKGGKLRFKKIKPEAFEANRFYTVINKKSGEIVPMEVNFNFDDPNLIILPLAFGKRQGREFIWNDLLSLETGSLKLANGRVIEKTLYNRRTRQDEPALFVALTFERREVLDSSNIKPMNLIGIDRGENIPAVIALTDPEGCPLSRFKDSLGNPTHILRIGESYKEKQRTIQAAKEVEQRRAGGYSRKYASKAKNLADDMVRNTARDLLYYAVTQDAMLIFENLSRGFGRQGKRTFMAERQYTRMEDWLTAKLAYEGLPSKTYLSKTLAQYTSKTCSNCGFTITSADYDRVLEKLKKTATGWMTTINGKELKVEGQITYYNRYKRQNVVKDLSVELDRLSEESVNNDISSWTKGRSGEALSLLKKRFSHRPVQEKFVCLNCGFETHADEQAALNIARSWLFLRSQEYKKYQTNKTTGNTDKRAFVETWQSFYRKKLKEVWKPAV

SEQ ID NO: 3977 - protein, 978 aa, Artificial Sequence
  CasX Protein Variant
MQEIKRINKIRRRLVKDSNTKKAGKTGPMKTLLVRVMTPDLRERLENLRKKPENIPQPISNTSRANLNKLLTDYTEMKKAILHVYWEEFQKDPVGLMSRVAQPAPKNIDQRKLIPVKDGNERLTSSGFACSQCCQPLYVYKLEQVNDKGKPHTNYFGRCNVSEHERLILLSPHKPEANDELVTYSLGKFGQRALDFYSIHVTRESNHPVKPLEQIGGNSCASGPVGKALSDACMGAVASFLTKYQDIILEHQKVIKKNEKRLANLKDIASANGLAFPKITLPPQPHTKEGIEAYNNVVAQIVIWVNLNLWQKLKIGRDEAKPLQRLKGFPSFPLVERQANEVDWWDMVCNVKKLINEKKEDGKVFWQNLAGYKRQEALLPYLSSEEDRKKGKKFARYQFGDLLLHLEKKHGEDWGKVYDEAWERIDKKVEGLSKHIKLEEERRSEDAQSKAALTDWLRAKASFVIEGLKEADKDEFCRCELKLQKWYGDLRGKPFAIEAENSILDISGFSKQYNCAFIWQKDGVKKLNLYLIINYFKGGKLRFKKIKPEAFEANRFYTVINKKSGEIVPMEVNFNFDDPNLIILPLAFGKRQGREFIWNDLLSLETGSLKLANGRVIEKTLYNRRTRQDEPALFVALTFERREVLDSSNIKPMNLIGIDRGENIPAVIALTDPEGCPLSRFKDSLGNPTHILRIGESYKEKQRTIQAAKEVEQRRAGGYSRKYASKAKNLADDMVRNTARDLLYYAVTQDAMLIFENLSRGFGRQGKRTFMAERQYTRMEDWLTAKLAYEGLPSKTYLSKTLAQYTSKTCSNCGFTITSADYDRVLEKLKKTATGWMTTINGKELKVEGQITYYNRYKRQNVVKDLSVELDRLSEESVNNDISSWTKGRSGEALSLMKKRFSHRPVQEKFVCLNCGFETHADEQAALNIARSWLFLRSQEYKKYQTNKTTGNTDKRAFVETWQSFYRKKLKEVWKPAV

SEQ ID NO: 3978 - protein, 978 aa, Artificial Sequence
  CasX Protein Variant
MQEIKRINKIRRRLVKDSNTKKAGKTGPMKTLLVRVMTPDLRERLENLRKKPENIPQPISNTSRANLNKLLTDYTEMKKAILHVYWEEFQKDPVGLMSRVAQPAPKNIDQRKLIPVKDGNERLTSSGFACSQCCQPLYVYKLEQVNDKGKPHTNYFGRCNVSEHERLILLSPHKPEANDELVTYSLGKFGQRALDFYSIHVTRESNHPVKPLEQIGGNSCASGPVGKALSDACMGAVASFLTKYQDIILEHQKVIKKNEKRLANLKDIASANGLAFPKITLPPQPHTKEGIEAYNNVVAQIVIWVNLNLWQKLKIGRDEAKPLQRLKGFPSFPLVERQANEVDWWDMVCNVKKLINEKKEDGKVFWQNLAGYKRQEALLPYLSSEEDRKRGKKFARYQFGDLLLHLEKKHGEDWGKVYDEAWERIDKKVEGLSKHIKLEEERRSEDAQSKAALTDWLRAKASFVIEGLKEADKDEFCRCELKLQKWYGDLRGKPFAIEAENSILDISGFSKQYNCAFIWQKDGVKKLNLYLIINYFKGGKLRFKKIKPEAFEANRFYTVINKKSGEIVPMEVNFNFDDPNLIILPLAFGKRQGREFIWNDLLSLETGSLKLANGRVIEKTLYNRRTRQDEPALFVALTFERREVLDSSNIKPMNLIGIDRGENIPAVIALTDPEGCPLSRFKDSLGNPTHILRIGESYKEKQRTIQAAKEVEQRRAGGYSRKYASKAKNLADDMVRNTARDLLYYAVTQDAMLIFENLSRGFGRQGKRTFMAERQYTRMEDWLTAKLAYEGLPSKTYLSKTLAQYTSKTCSNCGFTITSADYDRVLEKLKKTATGWMTTINGKELKVEGQITYYNRYKRQNVVKDLSVELDRLSEESVNNDISSWTKGRSGEALSLLKKRFSHRPVQEKFVCLNCGFETHADEQAALNIARSWLFLRSQEYKKYQTNKTTGNTDKRAFVETWQSFYRKKLKEVWKPAV

SEQ ID NO: 3979 - protein, 978 aa, Artificial Sequence; identical to SEQ ID NO: 3978
  CasX Protein Variant

SEQ ID NO: 3980 - protein, 978 aa, Artificial Sequence
  CasX Protein Variant
MQEIKRINKIRRRLVKDSNTKKAGKTGPMKTLLVRVMTPDLRERLENLRKKPENIPQPISNTSRANLNKLLTDYTEMKKAILHVYWEEFQKDPVGLMSRVAQPAPKNIDQRKLIPVKDGNERLTSSGFACSQCCQPLYVYKLEQVNDKGKPHTNYFGRCNVSEHERLILLSPHKPEANDELVTYSLGKFGQRALDFYSIHVTRESNHPVKPLEQIGGNSCASGPVGKALSDACMGAVASFLTKYQDIILEHQKVIKKNEKRLANLKDIASANGLAFPKITLPPQPHTKEGIEAYNNVVAQIVIWVNLNLWQKLKIGRDEAKPLQRLKGFPSFPLVERQANEVDWWDMVCNVKKLINEKKEDGKVFWQNLAGYKRQEALLPYLSSEEDRKKGKKFARYQFGDLLLHLEKKHGEDWGKVYDEAWERIDKKVEGLSKHIKLEEERRSEDAQSKAALTDWLRAKASFVIEGLKEADKDEFCRCELKLQKWYGDLRGKPFAIEAENSILDISGFSKQYNCAFIWQKDGVKKLNLYLIINYFKGGKLRFKKIKPEAFEANRFYTVINKKSGEIVPMEVNFNFDDPNLIILPLAFGKRQGREFIWNDLLSLETGSLKLANGRVIEKTLYNRRTRQDEPALFVALTFERREVLDSSNIKPMNLIGIDRGENIPAVIALTDPEGCPLSRFKDSLGNPTHILRIGESYKEKQRTIQAAKEVEQRRAGGYSRKYASKAKNLADDMVRNTARDLLYYAVTQDAMLIFENLSRGFGRQGKRTFMAERQYTRMEDWLTAKLAYEGGPSKTYLSKTLAQYTSKTCSNCGFTITSADYDRVLEKLKKTATGWMTTINGKELKVEGQITYYNRYKRQNVVKDLSVELDRLSEESVNNDISSWTKGRSGEALSLLKKRFSHRPVQEKFVCLNCGFETHADEQAALNIARSWLFLRSQEYKKYQTNKTTGNTDKRAFVETWQSFYRKKLKEVWKPAV

SEQ ID NO: 3981 - protein, 978 aa, Artificial Sequence; identical to SEQ ID NO: 3921
  CasX Protein Variant

SEQ ID NO: 3982 - protein, 978 aa, Artificial Sequence
  CasX Protein Variant
MQEIKRINKIRRRLVKDSNTKKAGKTGPMKTLLVRVMTPDLRERLENLRKKPENIPQPISNTSRANLNKLLTDYTEMKKAILHVYWEEFQKDPVGLMSRVAQPAPKNIDQRKLIPVKDGNERLTSSGFACSQCCQPLYVYKLEQVNDKGKPHTNYFGRCNVSEHERLILLSPHKPEANDELVTYSLGKFGQRALDFYSIHVTRESNHPVKPLEQIGGNSCASGPVGKALSDACMGAVASFLTKYQDIILEHQKVIKKNEKRLANLKDIASANGLAFPKITLPPQPHTKEGIEAYNNVVAQIVIWVNLNLWQKLKIGRDEAKPLQRLKGFPSFPLVERQANEVDWWDMVCNVKKLINEKKEDGKVFWQNLAGYKRQEALLPYLSSEEDRKKGKKFARYQFGDLLLHLEKKHGEDWGKVYDEAWERIDKKVEGLSKHIKLEEERRSEDAQSKAALTDWLRAKASFVIEGLKEADKDEFCRCELKLQKWYGDLRGKPFAIEAENSILDISGFSKQYNCAFIWQKDGVKKLNLYLIINYFKGGKLRFKKIKPEAFEANRFYTVINKKSGEIVPMEVNFNFDDPNLIILPLAFGKRQGREFIWNDLLSLETGSLKLANGRVIEKTLYNGRTRQDEPALFVALTFERREVLDSSNIKPMNLIGIDRGENIPAVIALTDPEGCPLSRFKDSLGNPTHILRIGESYKEKQRTIQAAKEVEQRRAGGYSRKYASKAKNLADDMVRNTARDLLYYAVTQDAMLIFENLSRGFGRQGKRTFMAERQYTRMEDWLTAKLAYEGLPSKTYLSKTLAQYTSKTCSNCGFTITSADYDRVLEKLKKTATGWMTTINGKELKVEGQITYYNRYKRQNVVKDLSVELDRLSEESVNNDISSWTKGRSGEALSLLKKRFSHRPVQEKFVCLNCGFETHADEQAALNIARSWLFLRSQEYKKYQTNKTTGNTDKRAFVETWQSFYRKKLKEVWKPAV

SEQ ID NO: 3983 - protein, 978 aa, Artificial Sequence
  CasX Protein Variant
MQEIKRINKIRRRLVKDSNTKKAGKTGPMKTLLVRVMTPDLRERLENLRKKPENIPQPISNTSRANLNKLLTDYTEMKKAILHVYWEEFQKDPVGLMSRVAQPAPKNIDQRKLIPVKDGNERLTSSGFACSQCCQPLYVYKLEQVNDKGKPHTNYFGRCNVSEHERLILLSPHKPEANDELVTYSLGKFGQRALDFYSIHVTRESNHPVKPLEQIGGNSCASGPVGKALSDACMGAVASFLTKYQDIILEHQKVIKKNEKRLANLKDIASANGLAFPKITLPPQPHTKEGIEAYNNVVAQIVIWVNLNLWQKLKIGRDEAKPLQRLKGFPSFPLVERQANEVDWWDMVENVKKLINEKKEDGKVFWQNLAGYKRQEALLPYLSSEEDRKKGKKFARYQFGDLLLHLEKKHGEDWGKVYDEAWERIDKKVEGLSKHIKLEEERRSEDAQSKAALTDWLRAKASFVIEGLKEADKDEFCRCELKLQKWYGDLRGKPFAIEAENSILDISGFSKQYNCAFIWQKDGVKKLNLYLIINYFKGGKLRFKKIKPEAFEANRFYTVINKKSGEIVPMEVNFNFDDPNLIILPLAFGKRQGREFIWNDLLSLETGSLKLANGRVIEKTLYNRRTRQDEPALFVALTFERREVLDSSNIKPMNLIGIDRGENIPAVIALTDPEGCPLSRFKDSLGNPTHILRIGESYKEKQRTIQAAKEVEQRRAGGYSRKYASKAKNLADDMVRNTARDLLYYAVTQDAMLIFENLSRGFGRQGKRTFMAERQYTRMEDWLTAKLAYEGLPSKTYLSKTLAQYTSKTCSNCGFTITSADYDRVLEKLKKTATGWMTTINGKELKVEGQITYYNRYKRQNVVKDLSVELDRLSEESVNNDISSWTKGRSGEALSLLKKRFSHRPVQEKFVCLNCGFETHADEQAALNIARSWLFLRSQEYKKYQTNKTTGNTDKRAFVETWQSFYRKKLKEVWKPAV

SEQ ID NO: 3984 - protein, 978 aa, Artificial Sequence
  CasX Protein Variant
MQEIKRINKIRRRLVKDSNTKKAGKTGPMKTLLVRVMTPDLRERLENLRKKPENIPQPISNTSRANLNKLLTDYTEMKKAILHVYWEEFQKDPVGLMSRVAQPAPKNIDQRKLIPVKDGNERLTSSGFACSQCCQPLYVYKLEQVNDKGKPHTNYFGRCNVSEHERLILLSPHKPEANDELVTYSLGKFGQRALDFYSIHVTRESNHPVKPLEQIGGNSCASGPVGKALSDACMGAVASFLTKYQDIILEHQKVIKKNEKRLANLKDIASANGLAFPKITLPPQPHTKEGIEAYNNVVAQIVIWVNLNLWQKLKIGRDEAKPLQRLKGFPSFPLVERQANEVDWWDMVCNVKKLINEKKEDGKVFWQNLAGYKRQEALLPYLSSEEDRKKGKKFARYQFGDLLLHLEKKHGEDWGKVYDEAWERIDKKVEGLSKHIKLEEERRSEDAQSKAALTDWLRAKASFVIEGLKEADKDEFCRCELKLQKWYGDLRGKPFAIKAENSILDISGFSKQYNCAFIWQKDGVKKLNLYLIINYFKGGKLRFKKIKPEAFEANRFYTVINKKSGEIVPMEVNFNFDDPNLIILPLAFGKRQGREFIWNDLLSLETGSLKLANGRVIEKTLYNRRTRQDEPALFVALTFERREVLDSSNIKPMNLIGIDRGENIPAVIALTDPEGCPLSRFKDSLGNPTHILRIGESYKEKQRTIQAAKEVEQRRAGGYSRKYASKAKNLADDMVRNTARDLLYYAVTQDAMLIFENLSRGFGRQGKRTFMAERQYTRMEDWLTAKLAYEGLPSKTYLSKTLAQYTSKTCSNCGFTITSADYDRVLEKLKKTATGWMTTINGKELKVEGQITYYNRYKRQNVVKDLSVELDRLSEESVNNDISSWTKGRSGEALSLLKKRFSHRPVQEKFVCLNCGFETHADEQAALNIARSWLFLRSQEYKKYQTNKTTGNTDKRAFVETWQSFYRKKLKEVWKPAV

SEQ ID NO: 3985 - protein, 978 aa, Artificial Sequence
  CasX Protein Variant
MQEIKRINKIRRRLVKDSNTKKAGKTGPMKTLLVRVMTPDLRERLENLRKKPENIPQPISNTSRANLNKLLTDYTEMKKAILHVYWEEFQKDPVGLMSRVAQPAPKNIDQRKLIPVKDGNERLTSSGFACSQCCQPLYVYKLEQVNDKGKPHTNYFGRCNVSEHERLILLSPHKPEANDELVTYSLGKFGQRALDFYSIHVTRESNHPVKPLEQIGGNSCASGPVGKALSDACMGAVASFLTKYQDIILEHQKVIKKNEKRLANLKDIASANGLAFPKITLPPQPHTKEGIEAYNNVVAQIVIWVNLNLWQKLKIGRDEAKPLQRLKGFPSFPLVERQANEVDWWDMVCNVKKLINEKKEDGKVFWQNLAGYKRQEALLPYLSSEEDQKKGKKFARYQFGDLLLHLEKKHGEDWGKVYDEAWERIDKKVEGLSKHIKLEEERRSEDAQSKAALTDWLRAKASFVIEGLKEADKDEFCRCELKLQKWYGDLRGKPFAIEAENSILDISGFSKQYNCAFIWQKDGVKKLNLYLIINYFKGGKLRFKKIKPEAFEANRFYTVINKKSGEIVPMEVNFNFDDPNLIILPLAFGKRQGREFIWNDLLSLETGSLKLANGRVIEKTLYNRRTRQDEPALFVALTFERREVLDSSNIKPMNLIGIDRGENIPAVIALTDPEGCPLSRFKDSLGNPTHILRIGESYKEKQRTIQAAKEVEQRRAGGYSRKYASKAKNLADDMVRNTARDLLYYAVTQDAMLIFENLSRGFGRQGKRTFMAERQYTRMEDWLTAKLAYEGLPSKTYLSKTLAQYTSKTCSNCGFTITSADYDRVLEKLKKTATGWMTTINGKELKVEGQITYYNRYKRQNVVKDLSVELDRLSEESVNNDISSWTKGRSGEALSLLKKRFSHRPVQEKFVCLNCGFETHADEQAALNIARSWLFLRSQEYKKYQTNKTTGNTDKRAFVETWQSFYRKKLKEVWKPAV

SEQ ID NO: 3986 - protein, 978 aa, Artificial Sequence
  CasX Protein Variant
MQEIKRINKIRRRLVKDSNTKKAGKTGPMKTLLVRVMTPDLRERLENLRKKPENFPQPISNTSRANLNKLLTDYTEMKKAILHVYWEEFQKDPVGLMSRVAQPAPKNIDQRKLIPVKDGNERLTSSGFACSQCCQPLYVYKLEQVNDKGKPHTNYFGRCNVSEHERLILLSPHKPEANDELVTYSLGKFGQRALDFYSIHVTRESNHPVKPLEQIGGNSCASGPVGKALSDACMGAVASFLTKYQDIILEHQKVIKKNEKRLANLKDIASANGLAFPKITLPPQPHTKEGIEAYNNVVAQIVIWVNLNLWQKLKIGRDEAKPLQRLKGFPSFPLVERQANEVDWWDMVCNVKKLINEKKEDGKVFWQNLAGYKRQEALLPYLSSEEDRKKGKKFARYQFGDLLLHLEKKHGEDWGKVYDEAWERIDKKVEGLSKHIKLEEERRSEDAQSKAALTDWLRAKASFVIEGLKEADKDEFCRCELKLQKWYGDLRGKPFAIEAENSILDISGFSKQYNCAFIWQKDGVKKLNLYLIINYFKGGKLRFKKIKPEAFEANRFYTVINKKSGEIVPMEVNFNFDDPNLIILPLAFGKRQGREFIWNDLLSLETGSLKLANGRVIEKTLYNRRTRQDEPALFVALTFERREVLDSSNIKPMNLIGIDRGENIPAVIALTDPEGCPLSRFKDSLGNPTHILRIGESYKEKQRTIQAAKEVEQRRAGGYSRKYASKAKNLADDMVRNTARDLLYYAVTQDAMLIFENLSRGFGRQGKRTFMAERQYTRMEDWLTAKLAYEGLPSKTYLSKTLAQYTSKTCSNCGFTITSADYDRVLEKLKKTATGWMTTINGKELKVEGQITYYNRYKRQNVVKDLSVELDRLSEESVNNDISSWTKGRSGEALSLLKKRFSHRPVQEKFVCLNCGFETHADEQAALNIARSWLFLRSQEYKKYQTNKTTGNTDKRAFVETWQSFYRKKLKEVWKPAV

SEQ ID NO: 3987 - protein, 978 aa, Artificial Sequence
  CasX Protein Variant
MQEIKRINKIRRRLVKDSNTKKAGKTGPMKTLLVRVMTPDLRERLENLRKKPENIPQPISNTSRANLNKLLTDYTEMKKAILHVYWEEFQKDPVGLMSRVAQPAPKNIDQRKLIPVKDGNERLTSSGFACSQCCQPLYVYKLEQVNDKGKPHTNYFGRCNVSEHERLILLSPHKPEANDELVTYSLGKFGQRALDFYSIHVTRESNHPVKPLEQIGGNSCASGPVGKALSDACMGAVASFLTKYQDIILEHQKVIKKNEKRLANLKDIASANGLAFPKITLPPQPHTKEGIEAYNNVVAQIVIWVNLNLWQKLKIGRDEAKPLQRLKGFPSFPLVERQANEVDWWDMVCNVKKLINEKKEDGKVFWQNLAGYKRQEALLPYLSSEEDRKKGKKFARYQFGDLLLHLEKKHGEDWGKVYDEAWERIDKKVEGLSKHIKLEEERRSEDAQSKAALTDWLRAKASFVIEGLKEADKDEFCRCELKLQKWYGDLRGKPFAIEAENSILDISGFSKQYNCAFIWQKDGVKKLNLYLIINYFKGGKLRFKKIKPEAFEANRFYTVINKKSGEIVPMEVNFNFDDPNLIILPLAFGKRQGREFIWNDLLSLETGSLKLANGRVIEKTLYNRRTRQDEPALFVALTFERREVLDSSNIKPMNLIGIDRGENIPAVIALTDPEGCPLSRFKDSLGNPTHILRIGESYKEKQRTIQAAKEVQQRRAGGYSRKYASKAKNLADDMVRNTARDLLYYAVTQDAMLIFENLSRGFGRQGKRTFMAERQYTRMEDWLTAKLAYEGLPSKTYLSKTLAQYTSKTCSNCGFTITSADYDRVLEKLKKTATGWMTTINGKELKVEGQITYYNRYKRQNVVKDLSVELDRLSEESVNNDISSWTKGRSGEALSLLKKRFSHRPVQEKFVCLNCGFETHADEQAALNIARSWLFLRSQEYKKYQTNKTTGNTDKRAFVETWQSFYRKKLKEVWKPAV

SEQ ID NO: 3988 - protein, 978 aa, Artificial Sequence
  CasX Protein Variant
MQEIKRINKIRRRLVKDSNTKKAGKTGPMKTLLVRVMTPDLRERLENLRKKPENIPQPISNTSRANLNKLLTDYTEMKKAILHVYWEEFQKDPVGLMSRVAQPAPKNIDQRKLIPVKDGNERLTSSGFACSQCCQPLYVYKLEQVNDKGKPHTNYFGRCNVSEHERLILLSPHKPEANDELVTYSLGKFGQRALDFYSIHVTRESNHPVKPLEQIGGNSCASGPVGKALSDACMGAVASFLTKYQDIILEHQKVIKKNEKRLANLKDIASANGLAFPKITLPPQPHTKEGIEAYNNVVAQIVIWVNLNLWQKLKIGRDEAKPLQRLKGFPSFPLVERQANEVDWWDMVCNVKKLINEKKEDGKVFWQNLAGYKRQEALLPYLSSEEDRKKGKKFARYQFGDLLLHLEKKHGEDWGKVYDEAWERIDKKVEGLSKHIKLEEERRSEDAQSKAALTDWLRAKASFVIEGLKEADKDKFCRCELKLQKWYGDLRGKPFAIEAENSILDISGFSKQYNCAFIWQKDGVKKLNLYLIINYFKGGKLRFKKIKPEAFEANRFYTVINKKSGEIVPMEVNFNFDDPNLIILPLAFGKRQGREFIWNDLLSLETGSLKLANGRVIEKTLYNRRTRQDEPALFVALTFERREVLDSSNIKPMNLIGIDRGENIPAVIALTDPEGCPLSRFKDSLGNPTHILRIGESYKEKQRTIQAAKEVEQRRAGGYSRKYASKAKNLADDMVRNTARDLLYYAVTQDAMLIFENLSRGFGRQGKRTFMAERQYTRMEDWLTAKLAYEGLPSKTYLSKTLAQYTSKTCSNCGFTITSADYDRVLEKLKKTATGWMTTINGKELKVEGQITYYNRYKRQNVVKDLSVELDRLSEESVNNDISSWTKGRSGEALSLLKKRFSHRPVQEKFVCLNCGFETHADEQAALNIARSWLFLRSQEYKKYQTNKTTGNTDKRAFVETWQSFYRKKLKEVWKPAV

SEQ ID NO: 3989 - protein, 980 aa, Artificial Sequence
  CasX Protein Variant
MQEIKRINKIRRRLVKDSNTKKAGKTGPMKTLLVRVMTPDLRERLENLRKKPENIPQPISNTSRANLNKLLTDYTEMKKAILHVYWEEFQKDPVGLMSRVAQPAPKNIDQRKLIPVKDGNERLTSSGFACSQCCQPLYVYKLEQVNDKGKPHTNYFGRCNVSEHERLILLSPHKPEANDELVTYSLGKFGQRALDFYSIHVTRESNHPVKPLEQIGGNSCASGPVGKALSDACMGAVASFLTKYQDIILEHQKVIKKNEKRLANLKDIASANGLAFPKITLPPQPHTKEGIEAYNNVVAQIVIWVNLNLWQKLKIGRDEAKPLQRLKGFPSFPLVERQANEVDWWDMVCNVKKLINEKKEDGKVFWQNLAGYKRQEALLPYLSSEEDRKKGKKFARYQFGDLLLHLEKKHGEDWGKVYDEAWERIDKKVEGLSKHIKLEEERRSEDAQSKAALTDWLRAKASFVIEGLKEADKDEFCRCELKLQKWYGDLRGKPFAIEAENSILDISGFSKQYNCAFIWQKDGVKKLNLYLIINYFKGGKLRFKKIKPEAFEANRFYTVINKKSGEIVPMEVNFNFDDPNLIILPLAFGKRQGREFIWNDLLSLETGSLKLANGRVIEKTLYNRRTRQDEPALFVALTFERREVLDSSNIKPMNLIGIDRGENIPAVIALTDPEGCPLSRFKDSLGNPTHILRIGESYKEKQRTIQAAKEVEQRRAGGYSRKYASKAKNLADDMVRNTARDLLYYAVTQDAMLIFENLSRGFGRQGKRTFMAERQYTRMEDWLTAKLAYEGLPSKASTYLSKTLAQYTSKTCSNCGFTITSADYDRVLEKLKKTATGWMTTINGKELKVEGQITYYNRYKRQNVVKDLSVELDRLSEESVNNDISSWTKGRSGEALSLLKKRFSHRPVQEKFVCLNCGFETHADEQAALNIARSWLFLRSQEYKKYQTNKTTGNTDKRAFVETWQSFYRKKLKEVWKPAV

SEQ ID NO: 3990 - protein, 978 aa, Artificial Sequence
  CasX Protein Variant
MQEIKRINKIRRRLVKDSNTKKAGKTGPMKTLLVRVMTPDLRERLENLRKKPENIPQPISNTSRANLNKLLTDYTEMKKAILHVYWEEFQKDPVGLMSRVAQPAPKNIDQRKLIPVKDGNERLTSSGFACSQCCQPLYVYKLEQVNDKGKPHTNYFGRCNVSEHERLILLSPHKPEANDELVTYSLGKFGQRALDFYSIHVTRESNHPVKPLEQIGGNSCASGPVGKALSDACMGAVASFLTKYQDIILEHQKVIKKNEKRLANLKDIASANGLAFPKITLPPQPHTKEGIEAYNNVVAQIVIWVNLNLWQKLKIGRDEAKPLQRLKGFPSFPLVERQANEVDWWDMVCNVKKLINEKKEDGKVFWQNLAGYKRQEALLPYLSSEEDRKKGKKFARYQFGDLLLHLEKKHGEDWGKVYDEAWERIDKKVEGLSKHIKLEEERRSEDAQSKAALTDWLRAKASFVIEGLKEADKDEFCRCELKLQKWYGDLRGKPFAIEAENSILDISGFSKQYNCAFIWQKDGVKKLNLYLIINYFKGGKLRFKKIKPEAFEANRFYTVINKKSGEIVPMEVNFNFDDPNLIILPLAFGKRQGREFIWNDLLSLETGSLKLANGRVIEKTLYNRRTREDEPALFVALTFERREVLDSSNIKPMNLIGIDRGENIPAVIALTDPEGCPLSRFKDSLGNPTHILRIGESYKEKQRTIQAAKEVEQRRAGGYSRKYASKAKNLADDMVRNTARDLLYYAVTQDAMLIFENLSRGFGRQGKRTFMAERQYTRMEDWLTAKLAYEGLPSKTYLSKTLAQYTSKTCSNCGFTITSADYDRVLEKLKKTATGWMTTINGKELKVEGQITYYNRYKRQNVVKDLSVELDRLSEESVNNDISSWTKGRSGEALSLLKKRFSHRPVQEKFVCLNCGFETHADEQAALNIARSWLFLRSQEYKKYQTNKTTGNTDKRAFVETWQSFYRKKLKEVWKPAV

SEQ ID NO: 3991 - protein, 978 aa, Artificial Sequence
  CasX Protein Variant
MQEIKRINKIRRRLVKDSNTKKAGKTGPMKTLLVRVMTPDLRERLENLRKKPENIPQPISNTSRANLNKLLTDYTEMKKAILHVYWEEFQKDPVGLMSRVAQPAPKNIDQRKLIPVKDGNERLTSSGFACSQCCQPLYVYKLEQVNDKGKPHTNYFGRCNVSEHERLILLSPHKPEANDELVTYSLGKFGQRALDFYSIHVTRESNHPVKPLEQIGGNSCASGPVGKALSDACMGAVASFLTKYQDIILEHQKVIKKNEKRLANLKDIASANGLAFPKITLPPQPHTKEGIEAYNNVVAQIVIWVNLNLWQKLKIGRDEAKPLQRLKGFPSFPLVERQANEVDWWDMVCNVKKLINEKKEDGKVFWQNLAGYKRQEALLPYLSSEEDRKKGKKFARYQFGDLLLHLEKKHGEDWGKVYDEAWERIDKKVEGLSKHIKLEEERRSEDAQSKAALTDWLRAKASFVIEGLKEADKDEFCRAELKLQKWYGDLRGKPFAIEAENSILDISGFSKQYNCAFIWQKDGVKKLNLYLIINYFKGGKLRFKKIKPEAFEANRFYTVINKKSGEIVPMEVNFNFDDPNLIILPLAFGKRQGREFIWNDLLSLETGSLKLANGRVIEKTLYNRRTRQDEPALFVALTFERREVLDSSNIKPMNLIGIDRGENIPAVIALTDPEGCPLSRFKDSLGNPTHILRIGESYKEKQRTIQAAKEVEQRRAGGYSRKYASKAKNLADDMVRNTARDLLYYAVTQDAMLIFENLSRGFGRQGKRTFMAERQYTRMEDWLTAKLAYEGLPSKTYLSKTLAQYTSKTCSNCGFTITSADYDRVLEKLKKTATGWMTTINGKELKVEGQITYYNRYKRQNVVKDLSVELDRLSEESVNNDISSWTKGRSGEALSLLKKRFSHRPVQEKFVCLNCGFETHADEQAALNIARSWLFLRSQEYKKYQTNKTTGNTDKRAFVETWQSFYRKKLKEVWKPAV

SEQ ID NO: 3992 - protein, 978 aa, Artificial Sequence
  CasX Protein Variant
MQEIKRINKIRRRLVKDSNTKKAGKTGPMKTLLVRVMTPDLRERLENLRKKPENIPQPISNTSRANLNKLLTDYTEMKKAILHVYWEEFQKDPVGLMSRVAQPAPKNIDQRKLIPVKDGNERLTSSGFACSQCCQPLYVYKLEQVNDKGKPHTNYFGRCNVSEHERLILLSPHKPEANDELVTYSLGKFGQRALDFYSIHVTRESNHPVKPLEQIGGNSCASGPVGKALSDACMGAVASFLTKYQDIILEHQKVIKKNEKRLANLKDIASANGLAFPKITLPPQPHTKEGIEAYNNVVAQIVIWVNLNLWQKLKIGRDEAKPLQRLKGFPSFPLVEREANEVDWWDMVCNVKKLINEKKEDGKVFWQNLAGYKRQEALLPYLSSEEDRKKGKKFARYQFGDLLLHLEKKHGEDWGKVYDEAWERIDKKVEGLSKHIKLEEERRSEDAQSKAALTDWLRAKASFVIEGLKEADKDEFCRCELKLQKWYGDLRGKPFAIEAENSILDISGFSKQYNCAFIWQKDGVKKLNLYLIINYFKGGKLRFKKIKPEAFEANRFYTVINKKSGEIVPMEVNFNFDDPNLIILPLAFGKRQGREFIWNDLLSLETGSLKLANGRVIEKTLYNRRTRQDEPALFVALTFERREVLDSSNIKPMNLIGIDRGENIPAVIALTDPEGCPLSRFKDSLGNPTHILRIGESYKEKQRTIQAAKEVEQRRAGGYSRKYASKAKNLADDMVRNTARDLLYYAVTQDAMLIFENLSRGFGRQGKRTFMAERQYTRMEDWLTAKLAYEGLPSKTYLSKTLAQYTSKTCSNCGFTITSADYDRVLEKLKKTATGWMTTINGKELKVEGQITYYNRYKRQNVVKDLSVELDRLSEESVNNDISSWTKGRSGEALSLLKKRFSHRPVQEKFVCLNCGFETHADEQAALNIARSWLFLRSQEYKKYQTNKTTGNTDKRAFVETWQSFYRKKLKEVWKPAV

SEQ ID NO: 3993 - protein, 978 aa, Artificial Sequence
  CasX Protein Variant
MQEIKRINKIRRRLVKDSNTKKAGQTGPMKTLLVRVMTPDLRERLENLRKKPENIPQPISNTSRANLNKLLTDYTEMKKAILHVYWEEFQKDPVGLMSRVAQPAPKNIDQRKLIPVKDGNERLTSSGFACSQCCQPLYVYKLEQVNDKGKPHTNYFGRCNVSEHERLILLSPHKPEANDELVTYSLGKFGQRALDFYSIHVTRESNHPVKPLEQIGGNSCASGPVGKALSDACMGAVASFLTKYQDIILEHQKVIKKNEKRLANLKDIASANGLAFPKITLPPQPHTKEGIEAYNNVVAQIVIWVNLNLWQKLKIGRDEAKPLQRLKGFPSFPLVERQANEVDWWDMVCNVKKLINEKKEDGKVFWQNLAGYKRQEALLPYLSSEEDRKKGKKFARYQFGDLLLHLEKKHGEDWGKVYDEAWERIDKKVEGLSKHIKLEEERRSEDAQSKAALTDWLRAKASFVIEGLKEADKDEFCRCELKLQKWYGDLRGKPFAIEAENSILDISGFSKQYNCAFIWQKDGVKKLNLYLIINYFKGGKLRFKKIKPEAFEANRFYTVINKKSGEIVPMEVNFNFDDPNLIILPLAFGKRQGREFIWNDLLSLETGSLKLANGRVIEKTLYNRRTRQDEPALFVALTFERREVLDSSNIKPMNLIGIDRGENIPAVIALTDPEGCPLSRFKDSLGNPTHILRIGESYKEKQRTIQAAKEVEQRRAGGYSRKYASKAKNLADDMVRNTARDLLYYAVTQDAMLIFENLSRGFGRQGKRTFMAERQYTRMEDWLTAKLAYEGLPSKTYLSKTLAQYTSKTCSNCGFTITSADYDRVLEKLKKTATGWMTTINGKELKVEGQITYYNRYKRQNVVKDLSVELDRLSEESVNNDISSWTKGRSGEALSLLKKRFSHRPVQEKFVCLNCGFETHADEQAALNIARSWLFLRSQEYKKYQTNKTTGNTDKRAFVETWQSFYRKKLKEVWKPAV

SEQ ID NO: 3994 - protein, 980 aa, Artificial Sequence
  CasX Protein Variant
MQEIKRINKIRRRLVKDSNTKKAGKTGPMKTLLVRVMTPDLRERLENLRKKPENIPQPISNTSRANLNKLLTDYTEMKKAILHVYWEEFQKDPVGLMSRVAQPAPKNIDQRKLIPVKDGNERLTSSGFACSQCCQPLYVYKLEQVNDKGKPHTNYFGRCNVSEHERLILLSPHKPEANDELVTYSLGKFGQRALDFYSIHVTRESNHPVKPLEQIGGNSCASGPVGKALSDACMGAVASFLTKYQDIILEHQKVIKKNEKRLANLKDIASANGLAFPKITLPPQPHTKEGIEAYNNVVAQIVIWVNLNLWQKLKIGRDEAKPLQRLKGFPSFPLVERQANEVDWWDMVCNVKKLINEKKEDGKVFWQNLAGYKRQEALLPYLSSEEDRKKGKKFARYQFGDLLLHLEKKHGEDWGKVYDEAWERIDKKVEGLSKHIKLEEERRSEDAQSKAALTDWLRAKASFVIEGLKEADKDEFCRCELKLQKWYGDLRGKPFAIEAENSILDISGFSKQYNCAFIWQKDGVKKLNLYLIINYFKGGKLRFKKIKPEAFEANRFYTVINKKSGEIVPMEVNFNFDDPNLIILPLAFGKRQGREFIWNDLLSLETGSLKLANGRVIEKTLYNRRTRQDEPALFVALTFERREVLDSSNIKPMNLIGIDRGENIPAVIALTDPEGCPLSRFKDSLGNPTHILRIGESYKEKQRTIQAAKEVEQRRAGGYSRKYASKAKNLADDMVRNTARDLLYYAVTQDAMLIFENLSRGFGRQGKRTFMAERQYTRMEDWLTAKLAYEGLPSASKTYLSKTLAQYTSKTCSNCGFTITSADYDRVLEKLKKTATGWMTTINGKELKVEGQITYYNRYKRQNVVKDLSVELDRLSEESVNNDISSWTKGRSGEALSLLKKRFSHRPVQEKFVCLNCGFETHADEQAALNIARSWLFLRSQEYKKYQTNKTTGNTDKRAFVETWQSFYRKKLKEVWKPAV

SEQ ID NO: 3995 - protein, 978 aa, Artificial Sequence
  CasX Protein Variant
MQEIKRINKIRRRLVKDSNTKKAGKTGPMKTLLVRVMTPDLRERLENLRKKPENIPQPISNTSRANLNKLLTDYTEMKKAILHVYWEEFQKDPVGLMSRVAQPAPKNIDQRKLIPVKDGNERLTSSGFACSQCCQPLYVYKLEQVNDKGKPHTNYFGRCNVSEHERLILLSPHKPEANDELVTYSLGKFGQRALDFYSIHVTRESNHPVKPLEQIGGNSCASGPVGKALSDACMGAVASFLTKYQDIILEHQKVIKKNEKRLANLKDIASANGLAFPKITLPPQPHTKEGIEAYNNVVAQIVIWVNLNLWQKLKIGRDEAKPLQRLKGFPSFPLVERQANEVDWWDMVCNVKKLINEKKEDGKVFWQNLAGYKRQEALLPYLSSEEDRKKGKKFARYQFGDLLLHLEKKHGEDWGKVYDEAWERIDKKVEGLSKHIKLEEERRSEDAQSKAALTDWLRAKASFVIEGLKEADKDEFCRCEQKLQKWYGDLRGKPFAIEAENSILDISGFSKQYNCAFIWQKDGVKKLNLYLIINYFKGGKLRFKKIKPEAFEANRFYTVINKKSGEIVPMEVNFNFDDPNLIILPLAFGKRQGREFIWNDLLSLETGSLKLANGRVIEKTLYNRRTRQDEPALFVALTFERREVLDSSNIKPMNLIGIDRGENIPAVIALTDPEGCPLSRFKDSLGNPTHILRIGESYKEKQRTIQAAKEVEQRRAGGYSRKYASKAKNLADDMVRNTARDLLYYAVTQDAMLIFENLSRGFGRQGKRTFMAERQYTRMEDWLTAKLAYEGLPSKTYLSKTLAQYTSKTCSNCGFTITSADYDRVLEKLKKTATGWMTTINGKELKVEGQITYYNRYKRQNVVKDLSVELDRLSEESVNNDISSWTKGRSGEALSLLKKRFSHRPVQEKFVCLNCGFETHADEQAALNIARSWLFLRSQEYKKYQTNKTTGNTDKRAFVETWQSFYRKKLKEVWKPAV

SEQ ID NO: 3996 - protein, 978 aa, Artificial Sequence
  CasX Protein Variant
MQEIKRINKIRRRLVKDSNTKKAGKTGPMKTLLVRVMTPDLRERLENLRKKPENIPQPISNTSRANLNKLLTDYTEMKKAILHVYWEEFQKDPVGLMSRVAQPAPKNIDQRKLIPVKDGNERLTSSGFACSQCCQPLYVYKLEQVNDKGKPHTNYFGRCNVSEHERLILLSPHKPEANDELVTYSLGKFGQRALDFYSIHVTRESNHPVKPLEQIGGNSCASGPVGKALSDACMGAVASFLTKYQDIILEHQKVIKKNEKRLANLKDIASANGLAFPKITLPPQPHTKEGIEAYNNVVAQIVIWVNLNLWQKLKIGRDEAKPLQRLKGFPSFPLVERQANEVDWWDMVCNVKKLINEKKEDGKVFWQNLAGYKRQEALLPYLSSEEDRKKGKKFARYQFGDLLLHLEKKHGEDWGKVYDEAWERIDKKVEGLSKHIKLEEERRSEDAQSKAALTDWLRAKASFVIEGLKEADKDEFCRCELKLQKWYGDLRGKPFAIEAENSILDISGFSKQYNCAFIWQKDGVKKLNLYLIINYFKGGKLRFKKIKPEAFKANRFYTVINKKSGEIVPMEVNFNFDDPNLIILPLAFGKRQGREFIWNDLLSLETGSLKLANGRVIEKTLYNRRTRQDEPALFVALTFERREVLDSSNIKPMNLIGIDRGENIPAVIALTDPEGCPLSRFKDSLGNPTHILRIGESYKEKQRTIQAAKEVEQRRAGGYSRKYASKAKNLADDMVRNTARDLLYYAVTQDAMLIFENLSRGFGRQGKRTFMAERQYTRMEDWLTAKLAYEGLPSKTYLSKTLAQYTSKTCSNCGFTITSADYDRVLEKLKKTATGWMTTINGKELKVEGQITYYNRYKRQNVVKDLSVELDRLSEESVNNDISSWTKGRSGEALSLLKKRFSHRPVQEKFVCLNCGFETHADEQAALNIARSWLFLRSQEYKKYQTNKTTGNTDKRAFVETWQSFYRKKLKEVWKPAV

SEQ ID NO: 3997 - protein, 978 aa, Artificial Sequence
  CasX Protein Variant
MQEIKRINKIRRRLVKDSNTKKAGKTGPMKTLLVRVMTPDLRERLENLRKKPENIPQPISNTSRANLNKLLTDYTEMKKAILHVYWEEFQKDPVGLMSRVAQPAPKNIDQRKLIPVKDGNERLTSSGFACSQCCQPLYVYKLEQVNDKGKPHINYFGRCNVSEHERLILLSPHKPEANDELVTYSLGKFGQRALDFYSIHVTRESNHPVKPLEQIGGNSCASGPVGKALSDACMGAVASFLTKYQDIILEHQKVIKKNEKRLANLKDIASANGLAFPKITLPPQPHTKEGIEAYNNVVAQIVIWVNLNLWQKLKIGRDEAKPLQRLKGFPSFPLVERQANEVDWWDMVCNVKKLINEKKEDGKVFWQNLAGYKRQEALLPYLSSEEDRKKGKKFARYQFGDLLLHLEKKHGEDWGKVYDEAWERIDKKVEGLSKHIKLEEERRSEDAQSKAALTDWLRAKASFVIEGLKEADKDEFCRCELKLQKWYGDLRGKPFAIEAENSILDISGFSKQYNCAFIWQKDGVKKLNLYLIINYFKGGKLRFKKIKPEAFEANRFYTVINKKSGEIVPMEVNFNFDDPNLIILPLAFGKRQGREFIWNDLLSLETGSLKLANGRVIEKTLYNRRTRQDEPALFVALTFERREVLDSSNIKPMNLIGIDRGENIPAVIALTDPEGCPLSRFKDSLGNPTHILRIGESYKEKQRTIQAAKEVEQRRAGGYSRKYASKAKNLADDMVRNTARDLLYYAVTQDAMLIFENLSRGFGRQGKRTFMAERQYTRMEDWLTAKLAYEGLPSKTYLSKTLAQYTSKTCSNCGFTITSADYDRVLEKLKKTATGWMTTINGKELKVEGQITYYNRYKRQNVVKDLSVELDRLSEESVNNDISSWTKGRSGEALSLLKKRFSHRPVQEKFVCLNCGFETHADEQAALNIARSWLFLRSQEYKKYQTNKTTGNTDKRAFVETWQSFYRKKLKEVWKPAV

SEQ ID NO: 3998 - protein, 978 aa, Artificial Sequence
  CasX Protein Variant
MQEIKRINKIRRRLVKDSNTKKAGKTGPMKTLLVRVMTPDLRERLENLRKKPENIPQPISNTSRANLNKLLTDYTEMKKAILHVYWEEFQKDPVGLMSRVAQPAPKNIDQRKLIPVKDGNERLTSSGFACSQCCQPLYVYKLEQVNDKGKPHTNYFGRCNVSEHERLILLSPHKPEANDELVTYSLGKFGQRALDFYSIHVTRESNHPVKPLEQIGGNSCASGPVGKALSDACMGAVASFLTKYQDIILEHQKVIKKNEKRLANLKDIASANGLAFPKITLPPQPHTKEGIEAYNNVVAQIVIWVNLNLWQKLKIGRDEAKPLQRLKGFPSFPLVERQANEVDWWDMVCNVKKLINEKKEDGKVFWQNLAGYKRQEALLPYLSSEEDRKKGKKFARYQFGDLLLHLEKKHGEDWGKVYDEAWERIDKKVEGLSKHIKLEEERRSEDAQSKAALTDWLRAKASFVIEGLKEADKDEFCRCELKLQKWYGDLRGKPFAIEAENSILDISGFSKQYNCAFIWQKDGVKKLNLYLIINYFKGGKLRFKKIKPEAFEANRFYTVINKKSGEIVPMEVNFNFDDPNLIILPLAFGKRQGREFIWNDLLSLETGSLKLANGRVIEKTLYNRRTRQDEPALFVALTFERREVLDSSNIKPMNLIGIDRGENIPAVIALTDPEGCPLSRFKDSLGNPTHILRIGESYKEKQRTIQAAKEVEQRRAGGYSRKYASKAKNLADDMVRNTARDLLYYAVTQDAMLIFENLSRGFGRQGKRTFMAERQYTRMEDWLTAKLAYEGLPSKTYLSKTLAQYTSKTCSNCGFTITSADYDRVLEKLKKTATGWMTTINGKELKVEGQITYYNRYKRQNVVKDLSVELDRLSEESVNDDISSWTKGRSGEALSLLKKRFSHRPVQEKFVCLNCGFETHADEQAALNIARSWLFLRSQEYKKYQTNKTTGNTDKRAFVETWQSFYRKKLKEVWKPAV

SEQ ID NO: 3999 - protein, 978 aa, Artificial Sequence; identical to SEQ ID NO: 3957
  CasX Protein Variant

SEQ ID NO: 4000 - protein, 978 aa, Artificial Sequence
  CasX Protein Variant
MQEIKRINKIRRRLVKDSNTKKAGKTGPMKTLLVRVMTPDLRERLENLRKKPENIPQPISNTSRANLNKLLTDYTEMKKAILHVYWEEFQKDPVGLMSRVAQPAPKNIDQRKLIPVKDGNERLTSSGFACSQCCQPLYVYKLEQVNDKGKPHTNYFGRCNVSEHERLILLSPHKPEANDELVTYSLGKFGQRALDFYSIHVTRESNHPVKPLEQIGGNSCASGPVGKALSDASMGAVASFLTKYQDIILEHQKVIKKNEKRLANLKDIASANGLAFPKITLPPQPHTKEGIEAYNNVVAQIVIWVNLNLWQKLKIGRDEAKPLQRLKGFPSFPLVERQANEVDWWDMVCNVKKLINEKKEDGKVFWQNLAGYKRQEALLPYLSSEEDRKKGKKFARYQFGDLLLHLEKKHGEDWGKVYDEAWERIDKKVEGLSKHIKLEEERRSEDAQSKAALTDWLRAKASFVIEGLKEADKDEFCRCELKLQKWYGDLRGKPFAIEAENSILDISGFSKQYNCAFIWQKDGVKKLNLYLIINYFKGGKLRFKKIKPEAFEANRFYTVINKKSGEIVPMEVNFNFDDPNLIILPLAFGKRQGREFIWNDLLSLETGSLKLANGRVIEKTLYNRRTRQDEPALFVALTFERREVLDSSNIKPMNLIGIDRGENIPAVIALTDPEGCPLSRFKDSLGNPTHILRIGESYKEKQRTIQAAKEVEQRRAGGYSRKYASKAKNLADDMVRNTARDLLYYAVTQDAMLIFENLSRGFGRQGKRTFMAERQYTRMEDWLTAKLAYEGLPSKTYLSKTLAQYTSKTCSNCGFTITSADYDRVLEKLKKTATGWMTTINGKELKVEGQITYYNRYKRQNVVKDLSVELDRLSEESVNNDISSWTKGRSGEALSLLKKRFSHRPVQEKFVCLNCGFETHADEQAALNIARSWLFLRSQEYKKYQTNKTTGNTDKRAFVETWQSFYRKKLKEVWKPAV

SEQ ID NO: 4001 - protein, 978 aa, Artificial Sequence
  CasX Protein Variant
MQEIKRINKIRRRLVKDSNTKKAGKTGPMKTLLVRVMTPDLRERLENLRKKPENIPQPISNTSRANLNKLLTDYTEMKKAILHVYWEEFQKDPVGLMSRVAQPAPKNIDQRKLIPVKDGNERLTSSGFACSQCCQPLYVYKLEQVNDKGKPHTNYFGRCNVSEHERLILLSPHKPEANDELVTYSLGKFGQRALDFYSIHVTRESNHPVKPLEQIGGNSCASGPVGKALSDACMGAVASFLTKYQDIILEHQKVIKKNEKRLANLKDIASANGLAFPKITLPPQPHTKEGIEAYNNVVAQIVIWVNLNLWQKLKIGRDEAKPLQRLKGFPSFPLVERQANEVDWWDMVCNVKKLINEKKEDGKVFWKNLAGYKRQEALLPYLSSEEDRKKGKKFARYQFGDLLLHLEKKHGEDWGKVYDEAWERSDKKVEGLSKHIKLEEERRSEDAQSKAALTDWLRAKASFVIEGLKEADKDEFCRCELKLQKWYGDLRGKPFAIEAENSILDISGFSKQYNCAFIWQKDGVKKLNLYLIINYFKGGKLRFKKIKPEAFEANRFYTVINKKSGEIVPMEVNFNFDDPNLIILPLAFGKRQGREFIWNDLLSLETGSLKLANGRVIEKTLYNRRTRQDEPALFVALTFERREVLDSSNIKPMNLIGIDRGENIPAVIALTDPEGCPLSRFKDSLGNPTHILRIGESYKEKQRTIQAAKEVEQRRAGGYSRKYASKAKNLADDMVRNTARDLLYYAVTQDAMLIFENLSRGFGRQGKRTFMAERQYTRMEDWLTAKLAYEGLPSKTYLSKTLAQYTSKTCSNCGFTITSADYDRVLEKLKKTATGWMTTINGKELKVEGQITYYNRYKRQNVVKDLSVELDRLSEESVNNDISSWTKGRSGEALSLLKKRFSHRPVQEKFVCLNCGFETHADEQAALNIARSWLFLRSQEYKKYQTNKTTGNTDKRAFVETWQSFYRKKLKEVWKPAV

SEQ ID NO: 4002 - protein, 978 aa, Artificial Sequence
  CasX Protein Variant
MQEIKRINKIRRRLVKDSNTKKAGKTGPMKTLLVRVMTPDLRERLENLRKKPENIPQPISNTSRANLNKLLTDYTEMKKAILHVYWEEFQKDPVGLMSRVAQPAPKNIDQRKLIPVKDGNERLTSSGFACSQCCQPLYVYKLEQVNDKGKPHTNYFGRCNVSEHERLILLSPHKPEANDELVTYSLGKFGQRALDFYSIHVTRESNHPVKPLEQIGGNSCASGPVGKALSDACMGAVASFLTKYQDIILEHQKVIKKNEKRLANLKDIASANGLAFPKITLPPQPHTKEGIEAYNNVVAQIVIWVNLNLWQKLKIGRDEAKPLQRLKGFPSFPLVERQANEVDWWDMVCNVKKLINEKKEDGKVFWQNLAGYKRQEALLPYLSSEEDRKKGKKFARYQFGDLLLHLEKKHGEDWGKVYDEAWERIDKKVEGLSKHIKLEEERRSEDAQSKAALTDWLRAKASFVIEGLKEADKDEFCRCELKLQKWYGDLRGKPFAIEAENSILDISGFSKQYNCAFIWQKDGVKKLNLYLIINYFKGGKLRFKKIKPEAFEANRFYTVINKKSGEIVPMEVNFNFDDPNLIILPLAFGKRQGREFIWNDLLSLETGSLKLANGRVIEKTLYNRRTRQDEPALFVALTFERREVLDSSNIKPMNLIGIDRGENIPAVIALTDPEGCPLSRFKDSIGNPTHILRIGESYKEKQRTIQAAKEVEQRRAGGYSRKYASKAKNLADDMVRNTARDLLYYAVTQDAMLIFENLSRGFGRQGKRTFMAERQYTRMEDWLTAKLAYEGLPSKTYLSKTLAQYTSKTCSNCGFTITSADYDRVLEKLKKTATGWMTTINGKELKVEGQITYYNRYKRQNVVKDLSVELDRLSEESVNNDISSWTKGRSGEALSLLKKRFSHRPVQEKFVCLNCGFETHADEQAALNIARSWLFLRSQEYKKYQTNKTTGNTDKRAFVETWQSFYRKKLKEVWKPAV

SEQ ID NO: 4003 - protein, 978 aa, Artificial Sequence
  CasX Protein Variant
MQEIKRINKIRRRLVKDSNTKKAGKTGPMKTLLVRVMTPDLRERLENLRKKPENIPQPISNTSRANLNKLLTDYTEMKKAILHVYWEEFQKDPVGLMSRVAQPAPKNIDQRKLIPVKDGNERLTSSGFACSQCCQPLYVYKLEQVNDKGKPHTNYFGRCNVSEHERLILLSPHKPEANDELVTYSLGKFGQRALDFYSIHVTRESNHPVKPLEQIGGNSCASGPVGKALSDACMGAVASFLTKYQDIILEHQKVIKKNEKRLANLKDIASANGLAFPKITLPPQPHTKEGIEAYNNVVAQIVIWVNLNLWQKLKIGRDEAKPLQRLKGFPSFPLVERQANEVDWWDMVCNVKKLINEKKEDGKVFWQNLAGYKRQEALLPYLSSEEDRKKGKKFARYQFGDLLLHLEKKHGEDWGKVYDEAWERIDKKVEGLSKHIKLEEERRSEDAQSKAALTDWLRAKASFVIEGLKEADKDEFCRCELKLQKWYGDLRGKPFAIEAENSILDISGFSKQYNCAFIWQKDGVKKLNLYLIINYFKGGKLRFKKIKPEAFEANRFYTVINKKSGEIVPMEVNFNFDDPNLIILPLAFGKRQGREFIWNDLLSLETGSLKLANGRVIEKTLYNRRTRQDEPALFVALTFERREVLDSSNIKPMNLIGIDRGENIPAVIALTDPEGCPLSRFKDSLGNPTHILRIGESYKEKQRTIQAAKEVEQRRAGGYSRKYASKAKNLADDMVRNTARDLLYYAVTQDAMLIFENLSRGFGRQGKRTFMAERQYTRMEDWLTAKLAYEGLPSKTYLSKTLAQYTSKTCSNCGFTITSADYDRVLEKLKKTATGWMTTINGKELKVEGQITYYNRYKRQNVVKDLSVELDRLSEESVNNDISSWTKGRSGEALSLLKKRFSHRPVQEKFVCLNCGFETHADEQAALNIARSWLFLRSQEYQKYQTNKTTGNTDKRAFVETWQSFYRKKLKEVWKPAV

SEQ ID NO: 4004 - protein, 978 aa, Artificial Sequence
  CasX Protein Variant
MQEIKRINKIRRRLVKDSNTKKAGKTGPMKTLLVRVMTPDLRERLEDLRKKPENIPQPISNTSRANLNKLLTDYTEMKKAILHVYWEEFQKDPVGLMSRVAQPAPKNIDQRKLIPVKDGNERLTSSGFACSQCCQPLYVYKLEQVNDKGKPHTNYFGRCNVSEHERLILLSPHKPEANDELVTYSLGKFGQRALDFYSIHVTRESNHPVKPLEQIGGNSCASGPVGKALSDACMGAVASFLTKYQDIILEHQKVIKKNEKRLANLKDIASANGLAFPKITLPPQPHTKEGIEAYNNVVAQIVIWVNLNLWQKLKIGRDEAKPLQRLKGFPSFPLVERQANEVDWWDMVCNVKKLINEKKEDGKVFWQNLAGYKRQEALLPYLSSEEDRKKGKKFARYQFGDLLLHLEKKHGEDWGKVYDEAWERIDKKVEGLSKHIKLEEERRSEDAQSKAALTDWLRAKASFVIEGLKEADKDEFCRCELKLQKWYGDLRGKPFAIEAENSILDISGFSKQYNCAFIWQKDGVKKLNLYLIINYFKGGKLRFKKIKPEAFEANRFYTVINKKSGEIVPMEVNFNFDDPNLIILPLAFGKRQGREFIWNDLLSLETGSLKLANGRVIEKTLYNRRTRQDEPALFVALTFERREVLDSSNIKPMNLIGIDRGENIPAVIALTDPEGCPLSRFKDSLGNPTHILRIGESYKEKQRTIQAAKEVEQRRAGGYSRKYASKAKNLADDMVRNTARDLLYYAVTQDAMLIFENLSRGFGRQGKRTFMAERQYTRMEDWLTAKLAYEGLPSKTYLSKTLAQYTSKTCSNCGFTITSADYDRVLEKLKKTATGWMTTINGKELKVEGQITYYNRYKRQNVVKDLSVELDRLSEESVNNDISSWTKGRSGEALSLLKKRFSHRPVQEKFVCLNCGFETHADEQAALNIARSWLFLRSQEYKKYQTNKTTGNTDKRAFVETWQSFYRKKLKEVWKPAV

SEQ ID NO: 4005 - protein, 978 aa, Artificial Sequence
  CasX Protein Variant
MQEIKRINKIRRRLVKDSNTKKAGKTGPMKTLLVRVMTPDLRERLENLRKKPENIPQPISNTSRANLNKLLTDYTEMKKAILHVYWEEFQKDPVGLMSRVAQPAPKNIDQRKLIPVKDGNERLTSSGFACSQCCQPLYVYKLEQVNDKGKPHTNYFGRCNVSEHERLILLSPHKPEANDELVTYSLGKFGQRALDFYSIHVTRESNHPVKPLEQIGGNSCASGPVGKALSDACMGAVASFLTKYQDIILEHQKVIKKNEKRLANLKDIASANGLAFPKITLPPQPHTKEGIEAYNNVVAQIVIWVNLNLWQKLKIGRDEAKPLQRLKGFPSFPLVERQANEVDWWDMVCNVKKLINEKKEDGKVFWQNLAGYKRQEALLPYLSSEEDRKKGKKFARYQFGDLLLHLEKKHGEDWGKVYDEAWERIDKKVEGLSKHIKLEEERRSEDAQSKAALTDWLRAKASFVIEGLKEADKDEFCRCELKLQKWYGDLRGKPFAIEAENSILDISGFSKQYNCAFIWQKDGVKKLNLYLIINYFKGGKLRFKKIKPEAFEANRFYTVINKKSGEIVPMEVNFNFDDPNLIILPLAFGKRQGREFIWNDLLSLETGSLKLANGRVIEKTLYNRRTRQDEPALFMALTFERREVLDSSNIKPMNLIGIDRGENIPAVIALTDPEGCPLSRFKDSLGNPTHILRIGESYKEKQRTIQAAKEVEQRRAGGYSRKYASKAKNLADDMVRNTARDLLYYAVTQDAMLIFENLSRGFGRQGKRTFMAERQYTRMEDWLTAKLAYEGLPSKTYLSKTLAQYTSKTCSNCGFTITSADYDRVLEKLKKTATGWMTTINGKELKVEGQITYYNRYKRQNVVKDLSVELDRLSEESVNNDISSWTKGRSGEALSLLKKRFSHRPVQEKFVCLNCGFETHADEQAALNIARSWLFLRSQEYKKYQTNKTTGNTDKRAFVETWQSFYRKKLKEVWKPAV

SEQ ID NO: 4006 - protein, 978 aa, Artificial Sequence
  CasX Protein Variant
MQEIKRINKIRRRLVKDSNTKKAGKTDPMKTLLVRVMTPDLRERLENLRKKPENIPQPISNTSRANLNKLLTDYTEMKKAILHVYWEEFQKDPVGLMSRVAQPAPKNIDQRKLIPVKDGNERLTSSGFACSQCCQPLYVYKLEQVNDKGKPHTNYFGRCNVSEHERLILLSPHKPEANDELVTYSLGKFGQRALDFYSIHVTRESNHPVKPLEQIGGNSCASGPVGKALSDACMGAVASFLTKYQDIILEHQKVIKKNEKRLANLKDIASANGLAFPKITLPPQPHTKEGIEAYNNVVAQIVIWVNLNLWQKLKIGRDEAKPLQRLKGFPSFPLVERQANEVDWWDMVCNVKKLINEKKEDGKVFWQNLAGYKRQEALLPYLSSEEDRKKGKKFARYQFGDLLLHLEKKHGEDWGKVYDEAWERIDKKVEGLSKHIKLEEERRSEDAQSKAALTDWLRAKASFVIEGLKEADKDEFCRCELKLQKWYGDLRGKPFAIEAENSILDISGFSKQYNCAFIWQKDGVKKLNLYLIINYFKGGKLRFKKIKPEAFEANRFYTVINKKSGEIVPMEVNFNFDDPNLIILPLAFGKRQGREFIWNDLLSLETGSLKLANGRVIEKTLYNRRTRQDEPALFVALTFERREVLDSSNIKPMNLIGIDRGENIPAVIALTDPEGCPLSRFKDSLGNPTHILRIGESYKEKQRTIQAAKEVEQRRAGGYSRKYASKAKNLADDMVRNTARDLLYYAVTQDAMLIFENLSRGFGRQGKRTFMAERQYTRMEDWLTAKLAYEGLPSKTYLSKTLAQYTSKTCSNCGFTITSADYDRVLEKLKKTATGWMTTINGKELKVEGQITYYNRYKRQNVVKDLSVELDRLSEESVNNDISSWTKGRSGEALSLLKKRFSHRPVQEKFVCLNCGFETHADEQAALNIARSWLFLRSQEYKKYQTNKTTGNTDKRAFVETWQSFYRKKLKEVWKPAV

SEQ ID NO: 4007 - protein, 978 aa, Artificial Sequence
  CasX Protein Variant
MQEIKRINKIRRRLVKDSNTKKAGKTGPMKTLLVRVMTPDLRERLENLRKKPENIPQPISNTSRANLNKLLTDYTEMKKAILHVYWEEFQKDPVGLMSRVAQPAPKNIDQRKLIPVKDGNERLTSSGFACSQCCQPLYVYKLEQVNDKGKPHTNYFGRCNVSEHERLILLSPHKPEANDELVTYSLGKFGQRALDFYSIHVTRESNHPVKPLEQIGGNSCASGPVGKALSDACMGAVASFLTKYQDIILEHQKVIKKNEKRLANLKDIASANGLAFPKITLPPQPHTKEGIEAYNNVVAQIVIWVNLNLWQKLKIGRDEAKPLQRLKGFPSFPLVERQANEVDWWDMVCNVKKLINEKKEDGKVFWQNLAGYKRQEALLPYLSSEEDRKKGKKFARYQFGDLLLHLEKKHGEDWGKVYDEAWERIDKKVEGLSKHIKLEEERRSEDAQSKAALTDWLRAKASFVIEGLKEADKDEFCRLELKLQKWYGDLRGKPFAIEAENSILDISGFSKQYNCAFIWQKDGVKKLNLYLIINYFKGGKLRFKKIKPEAFEANRFYTVINKKSGEIVPMEVNFNFDDPNLIILPLAFGKRQGREFIWNDLLSLETGSLKLANGRVIEKTLYNRRTRQDEPALFVALTFERREVLDSSNIKPMNLIGIDRGENIPAVIALTDPEGCPLSRFKDSLGNPTHILRIGESYKEKQRTIQAAKEVEQRRAGGYSRKYASKAKNLADDMVRNTARDLLYYAVTQDAMLIFENLSRGFGRQGKRTFMAERQYTRMEDWLTAKLAYEGLPSKTYLSKTLAQYTSKTCSNCGFTITSADYDRVLEKLKKTATGWMTTINGKELKVEGQITYYNRYKRQNVVKDLSVELDRLSEESVNNDISSWTKGRSGEALSLLKKRFSHRPVQEKFVCLNCGFETHADEQAALNIARSWLFLRSQEYKKYQTNKTTGNTDKRAFVETWQSFYRKKLKEVWKPAV

SEQ ID NO: 4008 - protein, 979 aa, Artificial Sequence
  CasX Protein Variant
MQEIKRINKIRRRLVKDSNTKKAGKTGPMKTLLVRVMTPDLRERLENLRKKPENIPQPISNTSRANLNKLLTDYTEMKKAILHVYWEEFQKDPVGLMSRVAQPAPKNIDQRKLIPVKDGNERLTSSGFACSQCCQPLYVYKLEQVNDKGKPHTNYFGRCNVSEHERLILLSPHKPEANDELVTYSLGKFGQRALDFYSIHVTRESNHPVKPLEQIGGNSCASGPVGKALSDACMGAVASFLTKYQDIILEHQKVIKKNEKRLANLKDIASANGLAFPKITLPPQPHTKEGIEAYNNVVAQIVIWVNLNLWQKLKIGRDEAKPLQRLKGFPSFPLVERQANEVDWWDMVCNVKKLINEKKEDGKVFWQNLAGYKRQEALLPYLSSEEDRKKGKKFARYQFGDLLLHLEKKHGEDWGKVYDEAWERIDKKVEGLSKHIKLEEERRSEDAQSKAALTDWLRAKASFVIEGLKEADKDEFCRCELKLQKWYGDLRGKPFAIEAENSILDISGFSKQYNCAFIWQKDGVKKLNLYLIINYFKGGKLRFKKIKPEAFEANRFYTVINKKSGEIVPMEVNFNFDDPNLIILPLAFGKRQGREFIWNDLLSLETGSLKLANGRVIEKTLYNRRTRQDEPALFVALTFERREVLDSSNIKPMNLIGIDRGENIPAVIALTDPEGCPLSRFKDSLGNPTHILRIGESYKEKQRTIQAAKEVEQRRAGGYSRKYASKAKNLADDMVRNTARDLLYYAVTQDAMLIFENLSRGFGRQGKRTFMAERQYTRMEDWLTAKLAYEGLASSKTYLSKTLAQYTSKTCSNCGFTITSADYDRVLEKLKKTATGWMTTINGKELKVEGQITYYNRYKRQNVVKDLSVELDRLSEESVNNDISSWTKGRSGEALSLLKKRFSHRPVQEKFVCLNCGFETHADEQAALNIARSWLFLRSQEYKKYQTNKTTGNTDKRAFVETWQSFYRKKLKEVWKPAV

SEQ ID NO: 4009 - protein, 978 aa, Artificial Sequence
  CasX Protein Variant
MQEIKRINKIRRRLVKDSNTKKAGKTGPMKTLLVRVMTPDLRERLENLRKKPENIPQPISNTSRANLNKLLSDYTEMKKAILHVYWEEFQKDPVGLMSRVAQPAPKNIDQRKLIPVKDGNERLTSSGFACSQCCQPLYVYKLEQVNDKGKPHTNYFGRCNVSEHERLILLSPHKPEANDELVTYSLGKFGQRALDFYSIHVTRESNHPVKPLEQIGGNSCASGPVGKALSDACMGAVASFLTKYQDIILEHQKVIKKNEKRLANLKDIASANGLAFPKITLPPQPHTKEGIEAYNNVVAQIVIWVNLNLWQKLKIGRDEAKPLQRLKGFPSFPLVERQANEVDWWDMVCNVKKLINEKKEDGKVFWQNLAGYKRQEALLPYLSSEEDRKKGKKFARYQFGDLLLHLEKKHGEDWGKVYDEAWERIDKKVEGLSKHIKLEEERRSEDAQSKAALTDWLRAKASFVIEGLKEADKDEFCRCELKLQKWYGDLRGKPFAIEAENSILDISGFSKQYNCAFIWQKDGVKKLNLYLIINYFKGGKLRFKKIKPEAFEANRFYTVINKKSGEIVPMEVNFNFDDPNLIILPLAFGKRQGREFIWNDLLSLETGSLKLANGRVIEKTLYNRRTRQDEPALFVALTFERREVLDSSNIKPMNLIGIDRGENIPAVIALTDPEGCPLSRFKDSLGNPTHILRIGESYKEKQRTIQAAKEVEQRRAGGYSRKYASKAKNLADDMVRNTARDLLYYAVTQDAMLIFENLSRGFGRQGKRTFMAERQYTRMEDWLTAKLAYEGLPSKTYLSKTLAQYTSKTCSNCGFTITSADYDRVLEKLKKTATGWMTTINGKELKVEGQITYYNRYKRQNVVKDLSVELDRLSEESVNNDISSWTKGRSGEALSLLKKRFSHRPVQEKFVCLNCGFETHADEQAALNIARSWLFLRSQEYKKYQTNKTTGNTDKRAFVETWQSFYRKKLKEVWKPAV

SEQ ID NO: 4010 - protein, 978 aa, Artificial Sequence
  CasX Protein Variant
MQEIKRINKIRRRLVKDSNTKKAGKTGPMKTLLVRVMTPDLRERLENLRKKPENIPQPISNTSRANLNKLLTDYTEMKKAILHVYWEEFQKDPVGLMSRVAQPAPKNIDQRKLIPVKDGNERLTSSGFACSQCCQPLYVYKLEQVNDKGKPHTNYFGRCNVSEHERLILLSPHKPEANDELVTYSLGKFGQRALDFYSIHVTRESNHPVKPLEQIGGNSCASGPVGKALSDACMGAVASFLTKYQDIILEHQKVIKKNEKRLANLKDIAWANGLAFPKITLPPQPHTKEGIEAYNNVVAQIVIWVNLNLWQKLKIGRDEAKPLQRLKGFPSFPLVERQANEVDWWDMVCNVKKLINEKKEDGKVFWQNLAGYKRQEALLPYLSSEEDRKKGKKFARYQFGDLLLHLEKKHGEDWGKVYDEAWERIDKKVEGLSKHIKLEEERRSEDAQSKAALTDWLRAKASFVIEGLKEADKDEFCRCELKLQKWYGDLRGKPFAIEAENSILDISGFSKQYNCAFIWQKDGVKKLNLYLIINYFKGGKLRFKKIKPEAFEANRFYTVINKKSGEIVPMEVNFNFDDPNLIILPLAFGKRQGREFIWNDLLSLETGSLKLANGRVIEKTLYNRRTRQDEPALFVALTFERREVLDSSNIKPMNLIGIDRGENIPAVIALTDPEGCPLSRFKDSLGNPTHILRIGESYKEKQRTIQAAKEVEQRRAGGYSRKYASKAKNLADDMVRNTARDLLYYAVTQDAMLIFENLSRGFGRQGKRTFMAERQYTRMEDWLTAKLAYEGLPSKTYLSKTLAQYTSKTCSNCGFTITSADYDRVLEKLKKTATGWMTTINGKELKVEGQITYYNRYKRQNVVKDLSVELDRLSEESVNNDISSWTKGRSGEALSLLKKRFSHRPVQEKFVCLNCGFETHADEQAALNIARSWLFLRSQEYKKYQTNKTTGNTDKRAFVETWQSFYRKKLKEVWKPAV

SEQ ID NO: 4011 - protein, 978 aa, Artificial Sequence
  CasX Protein Variant
MQEIKRINKIRRRLVKDSNTKKAGKTGPMKTLLVRVMTPDLRERLENLRKKPENIPQPISNTSRANLNKLLTDYTEMKKAILHVYWEEFQKDPVGLMSRVAQPAPKNIDQRKLIPVKDGNERLTSSGFACSQCCQPLYVYKLEQVNDKGKPHTNYFGRCNVSEHERLILLSPHKPEANDELVTYSLGKFGQRALDFYSIHVTRESNHPVKPLEQIGGNSCASGPVGKALSDACMGAVASFLTKYQDIILEHQKVIKKNEKRLANLKDIASANGLAFPKITLPPQPHTKEGIEAYNNVVAQIVIWVNLNLWQKLKIGRDEAKPLQRLKGFPSFPLVERQANEVDWWDMVCNVKKLINEKKEDGKVFWQNLAGYKRQEALLPYLSSEEDRKKGKKFARYQFGDLLLHLEKKHGEDWGKVYDEAWERIDKKVEGLSKHIKLEEERRSEDAQSKAALTDWLRAKASFVIEGLKEADKDEFCRCELKLQKWYGDLRGKPFAIEAENSILDISGFSKQYNCAFIWQKDGVKKLNLYLIINYFKGGKLRFKKIKPEAFEANRFYTVINKKSGEIVPMEVNFNFDDPNLIILPLAFGKRQGREFIWNDLLSLETGSLKLANGRVIEKTLYNRRTRQDEPALFVALTFERREVLDSSNIKPMNLIGIDRGENIPAVIALTDPEGCPLSRFKDSLGNPTHILRIGESYKEKQRTIQAAKEVEQRRAGGYSRKYASKAKNLADDMVRNTARDLLYYAVTQDSMLIFENLSRGFGRQGKRTFMAERQYTRMEDWLTAKLAYEGLPSKTYLSKTLAQYTSKTCSNCGFTITSADYDRVLEKLKKTATGWMTTINGKELKVEGQITYYNRYKRQNVVKDLSVELDRLSEESVNNDISSWTKGRSGEALSLLKKRFSHRPVQEKFVCLNCGFETHADEQAALNIARSWLFLRSQEYKKYQTNKTTGNTDKRAFVETWQSFYRKKLKEVWKPAV

SEQ ID NO: 4012 - protein, 978 aa, Artificial Sequence
  CasX Protein Variant
MQEIKRINKIRRRLVKDSNTKKAGKTGPMKTLLVRVMTPDLRERLENLRKKPENIPQPISNTSRANLNKLLTDYTEMKKAILHVYWEEFQKDPVGLMSRVARPAPKNIDQRKLIPVKDGNERLTSSGFACSQCCQPLYVYKLEQVNDKGKPHTNYFGRCNVSEHERLILLSPHKPEANDELVTYSLGKFGQRALDFYSIHVTRESNHPVKPLEQIGGNSCASGPVGKALSDACMGAVASFLTKYQDIILEHQKVIKKNEKRLANLKDIASANGLAFPKITLPPQPHTKEGIEAYNNVVAQIVIWVNLNLWQKLKIGRDEAKPLQRLKGFPSFPLVERQANEVDWWDMVCNVKKLINEKKEDGKVFWQNLAGYKRQEALLPYLSSEEDRKKGKKFARYQFGDLLLHLEKKHGEDWGKVYDEAWERIDKKVEGLSKHIKLEEERRSEDAQSKAALTDWLRAKASFVIEGLKEADKDEFCRCELKLQKWYGDLRGKPFAIEAENSILDISGFSKQYNCAFIWQKDGVKKLNLYLIINYFKGGKLRFKKIKPEAFEANRFYTVINKKSGEIVPMEVNFNFDDPNLIILPLAFGKRQGREFIWNDLLSLETGSLKLANGRVIEKTLYNRRTRQDEPALFVALTFERREVLDSSNIKPMNLIGIDRGENIPAVIALTDPEGCPLSRFKDSLGNPTHILRIGESYKEKQRTIQAAKEVEQRRAGGYSRKYASKAKNLADDMVRNTARDLLYYAVTQDAMLIFENLSRGFGRQGKRTFMAERQYTRMEDWLTAKLAYEGLPSKTYLSKTLAQYTSKTCSNCGFTITSADYDRVLEKLKKTATGWMTTINGKELKVEGQITYYNRYKRQNVVKDLSVELDRLSEESVNNDISSWTKGRSGEALSLLKKRFSHRPVQEKFVCLNCGFETHADEQAALNIARSWLFLRSQEYKKYQTNKTTGNTDKRAFVETWQSFYRKKLKEVWKPAV

SEQ ID NO: 4013 - protein, 978 aa, Artificial Sequence
  CasX Protein Variant
MQEIKRINKIRRRLVKDSNTKKAGKTGPMKTLLVRVMTPDLRERLENLRKKPENIPQPISNTSRANLNKLLTDYTEMKKAILHVYWEEFQKDPVGLMSRVAQPAPKNIDQRKLIPVKDGNERLTSSGFACSQCCQPLYVYKLEQVNDKGKPHTNYFGRCNVSEHERLILLSPHKPEANDELVTYSLGKFGQRALDFYSIHVTRESNHPVKPLEQIGGNSCASGPVGKALSDACMGAVASFLTKYQDIILEHQKVIKKNEKRLANLKDIASANGLAFPKITLPPQPHTKEGIEAYNNVVAQIVIWVNLNLWQKLKIGRDEAKPLQRLKGFPSFPLVERQANEVDWWDMVCNVKKLINEKKEDGKVFWQNLAGYKRQEALLPYLSSEEDRKKGKKFARYQFGDLLLHLEKKHGEDWGKVYDEAWERIDKKVEGLSKHIKLEEERRSEDAQSKAALTDWLRAKASFVIEGLKEADKDEFCRCELKLQKWYGDLRGKPFAIEAENSILDISGFSKQYNCAFIWQKDGVKKLNLYLIINYFKGGKLRFKKIKPEAFEANRFYTVINKKSGEIVPMEVNFNFDDPNLIILPLAFGKRQGREFIWNDLLSLETGSLKLANGRVIEKTLYNRRTRQDEPALFVALTFERREVLDSSNIKPMNLIGIDRGENIPAVIALTDPEGCPLSRFKDSLGNPTHILRIGESYKEKQRTIQAAKEVEQRRAGGYSRKYASKAKNLADDKVRNTARDLLYYAVTQDAMLIFENLSRGFGRQGKRTFMAERQYTRMEDWLTAKLAYEGLPSKTYLSKTLAQYTSKTCSNCGFTITSADYDRVLEKLKKTATGWMTTINGKELKVEGQITYYNRYKRQNVVKDLSVELDRLSEESVNNDISSWTKGRSGEALSLLKKRFSHRPVQEKFVCLNCGFETHADEQAALNIARSWLFLRSQEYKKYQTNKTTGNTDKRAFVETWQSFYRKKLKEVWKPAV

SEQ ID NO: 4014 - protein, 980 aa, Artificial Sequence; identical to SEQ ID NO: 3994
  CasX Protein Variant

SEQ ID NO: 4015 - protein, 978 aa, Artificial Sequence
  CasX Protein Variant
MQEIKRINKIRRRLVKDSNTKKAGKTGPMKTLLVRVMTPDLRERLENLRKKPENIPQPISNTSRANLNKLLTDYTEMKKAILHVYWEEFQKDPVGLMSRVAQPAPKNIDQRKLIPVKDGNERLTSSGFACSQCCQPLYVYKLEQVNDKGKPHTNYFGRCNVSEHERLILLSPHKPEANDELVTYSLGKYGQRALDFYSIHVTRESNHPVKPLEQIGGNSCASGPVGKALSDACMGAVASFLTKYQDIILEHQKVIKKNEKRLANLKDIASANGLAFPKITLPPQPHTKEGIEAYNNVVAQIVIWVNLNLWQKLKIGRDEAKPLQRLKGFPSFPLVERQANEVDWWDMVCNVKKLINEKKEDGKVFWQNLAGYKRQEALLPYLSSEEDRKKGKKFARYQFGDLLLHLEKKHGEDWGKVYDEAWERIDKKVEGLSKHIKLEEERRSEDAQSKAALTDWLRAKASFVIEGLKEADKDEFCRCELKLQKWYGDLRGKPFAIEAENSILDISGFSKQYNCAFIWQKDGVKKLNLYLIINYFKGGKLRFKKIKPEAFEANRFYTVINKKSGEIVPMEVNFNFDDPNLIILPLAFGKRQGREFIWNDLLSLETGSLKLANGRVIEKTLYNRRTRQDEPALFVALTFERREVLDSSNIKPMNLIGIDRGENIPAVIALTDPEGCPLSRFKDSLGNPTHILRIGESYKEKQRTIQAAKEVEQRRAGGYSRKYASKAKNLADDMVRNTARDLLYYAVTQDAMLIFENLSRGFGRQGKRTFMAERQYTRMEDWLTAKLAYEGLPSKTYLSKTLAQYTSKTCSNCGFTITSADYDRVLEKLKKTATGWMTTINGKELKVEGQITYYNRYKRQNVVKDLSVELDRLSEESVNNDISSWTKGRSGEALSLLKKRFSHRPVQEKFVCLNCGFETHADEQAALNIARSWLFLRSQEYKKYQTNKTTGNTDKRAFVETWQSFYRKKLKEVWKPAV

SEQ ID NO: 4016 - protein, 978 aa, Artificial Sequence
  CasX Protein Variant
MQEIKRINKIRRRLVKDSNTKKAGKTGPMKTLLVRVMTPDLRERLENLRKKPENIPQPISNTSRANLNKLLTDYTEMKKAILHVYWEEFQKDPVGLMSRVAQPAPKNIDQRKLIPVKDGNERLTSSGFACSQCCQPLYVYKLEQVNDKGKPHTNYFGRCNVSEHERLILLSPHKPEANDELVTYSLGKFGQRALDFYSIHVTRESNHPVKPLEQIGGNSCASGPVGKALSDACMGAVASFLTKYQDIILEHQKVIKKNEKRLANLKDIASANGLAFPKITLPPQPHTKEGIEAYNNVVAQIVIWVNLNLWQKLKIGRDEAKPLQRLKGFPSFPLVERQANEVDWWDMVCNVKKLINEKKEDGKVFWQNLAGYKRQEALLPYLSSEEDRKKGKKFARYQFGDLLLHLEKKHGEDWGKVYDEAWERIDKKVEGLSKHIKLEEERRSEDAQSKAALTDWLRAKASFVIEGLKEADKDEFCRCELKLQKWYGDLRGKPFAIEAENSILDISGFSKQYNCAFIWQKDGVKKLNLYLIINYFKGGKLRFKKIKPEAFEANRFYTVINKKSGEIVPMEVNFNFDDPNLIILPLAFGKRQGREFIWNDLLSLETGSLKLANGRVIEKTLYNRRTRQDEPALFVALTFERREVLDSSNIKPMNLIGIDRGENIPAVIALTDPEGCPLSRFKDSLGNPTHILRIGESYKEKQRTIQAAKEVEQRRAGGYSRKYASKAKNLADDMVRNTARDLLYYAVTQDAMLIFENLSRGFGRQGKRTFMAERQYTRMEDWLTAKLAYEGLPSKTYLSKTLAQYTSKTCSNCGFTITSADYDRVLEKLKKTATGWMTTINGKELKVEGQITYYNRYKRQNVVKDLSVELDRLSEESVNNDISSRTKGRSGEALSLLKKRFSHRPVQEKFVCLNCGFETHADEQAALNIARSWLFLRSQEYKKYQTNKTTGNTDKRAFVETWQSFYRKKLKEVWKPAV

SEQ ID NO: 4017 - protein, 978 aa, Artificial Sequence
  CasX Protein Variant
MQEIKRINKIRRRLVKDSNTKKAGKTGPMKTLLVRVMTPDLRERLENLRKKPENIPQPISNTSRANLNKLLTDYTEMKKAILHVYWEEFQKDPVGLMSRVAQPAPKNIDQRKLIPVKDGNERLTSSGFACSQCCQPLYVYKLEQVNDKGKPHTNYFGRCNVSEHERLILLSPHKPEANDELVTYSLGKFGQRALDFYSIHVTRESNHPVKPLEQIGGNSCASGPVGKALSDACMGAVASFLTKYQDIILEHQKVIKKNEKRLANLKDIASANGLAFPKITLPPQPHTKEGIEAYNNVVAQIVIWVNLNLWQKLKIGRDEAKPLQRLKGFPSFPLVERQANEVDWWDMVCNVKKLINEKKEDGKVFWQNLAGYKRQEALLPYLSSEEDRKKGKKFARYQFGDLLLHLEKKHGEDWGKVYDEAWERIDKKVEGLSKHIKLEEERRSEDAQSKAALTDWLRAKASFVIEGLKEADKDEFCRCELKLQKWYGDLRGKPFAIEAENSILDISGFSKQYNCAFIWQKDGVKKLNLYLIINYFKGGKLRFKKIKPEAFEANRFYTVINKKSGEIVPMEVNFNFDDPNLIILPLAFGKRQGREFIWNDLLSLETGSLKLANGRVIEKTLYNRRTRQDEPALFVDLTFERREVLDSSNIKPMNLIGIDRGENIPAVIALTDPEGCPLSRFKDSLGNPTHILRIGESYKEKQRTIQAAKEVEQRRAGGYSRKYASKAKNLADDMVRNTARDLLYYAVTQDAMLIFENLSRGFGRQGKRTFMAERQYTRMEDWLTAKLAYEGLPSKTYLSKTLAQYTSKTCSNCGFTITSADYDRVLEKLKKTATGWMTTINGKELKVEGQITYYNRYKRQNVVKDLSVELDRLSEESVNNDISSWTKGRSGEALSLLKKRFSHRPVQEKFVCLNCGFETHADEQAALNIARSWLFLRSQEYKKYQTNKTTGNTDKRAFVETWQSFYRKKLKEVWKPAV

SEQ ID NO: 4018 - protein, 978 aa, Artificial Sequence
  CasX Protein Variant
MQEIKRINKIRRRLVKDSNTKKAGKTGPMKTLLVRVMTPDLRERLENLRKKPENIPQPISNTSRANLNKLLTDYTEMKKAILHVYWEEFQKDPVGLMSRVAQPAPKNIDQRKLIPVKDGNERLTSSGFACSQCCQPLYVYKLEQVNDKGKPHTNYFGRCNVSEHERLILLSPHKPEANDELVTYSLGKFGQRALDFYSIHVTRESNHPVKPLEQIGGNSCASGPVGKALSDACMGAVASFLTKYQDIILEHQKVIKKNEKRLANLKDIASANGLAFPKITLPPQPHTKEGIEAYNNVVAQIVIWVNLNLWQKLKIGRDEAKPLQRLKGFPSFPLVERQANEVDWWDMVCNVKKLINEKKEDGKVFWQNLAGYKRQEALLPYLSSEEDRKKGKKFARYQFGDLLLHLEKKHGEDWGEVYDEAWERIDKKVEGLSKHIKLEEERRSEDAQSKAALTDWLRAKASFVIEGLKEADKDEFCRCELKLQKWYGDLRGKPFAIEAENSILDISGFSKQYNCAFIWQKDGVKKLNLYLIINYFKGGKLRFKKIKPEAFEANRFYTVINKKSGEIVPMEVNFNFDDPNLIILPLAFGKRQGREFIWNDLLSLETGSLKLANGRVIEKTLYNRRTRQDEPALFVALTFERREVLDSSNIKPMNLIGIDRGENIPAVIALTDPEGCPLSRFKDSLGNPTHILRIGESYKEKQRTIQAAKEVEQRRAGGYSRKYASKAKNLADDMVRNTARDLLYYAVTQDAMLIFENLSRGFGRQGKRTFMAERQYTRMEDWLTAKLAYEGLPSKTYLSKTLAQYTSKTCSNCGFTITSADYDRVLEKLKKTATGWMTTINGKELKVEGQITYYNRYKRQNVVKDLSVELDRLSEESVNNDISSWTKGRSGEALSLLKKRFSHRPVQEKFVCLNCGFETHADEQAALNIARSWLFLRSQEYKKYQTNKTTGNTDKRAFVETWQSFYRKKLKEVWKPAV

SEQ ID NO: 4019 - protein, 978 aa, Artificial Sequence
  CasX Protein Variant
MQEIKRINKIRRRLVKDSNTKKAGKTGPMKTLLVRVMTPDLRERLENLRKKPENIPQPISNTSRANLNKLLTDYTEMKKAILHVYWEEFQKDPVGLMSRVAQPAPKNIDQRKLIPVKDGNERLTSSGFACSQCCQPLYVYKLEQVNDKGKPHTNYFGRCNVSEHERLILLSPHKPEANDELVTYSLGKFGQRALDFYSIHVTRESNHPVKPLEQIGGNSCASGPVGKALSDACMGAVASFLTKYQDIILEHQKVIKKNEKRLANLKDIASANGLAFPKITLPPQPHTKEGIEAYNNVVAQIVIWVNLNLWQKLKIGRDEAKPLQRLKGFPSFPLVERQANEVDWWDMVCNVKKLINEKKEDGKVFWQNLAGYKRQEALLPYLSSEEDRKKGKKFARYQFGDLLLHLEKKHGEDWGKVYDEAWERIDKKVEGLSKHIKLEEERRSEDAQSKAALTDWLRAKASFVIEGLKEADKDEFCRCELKLQKWYGDLRGKPFAIEAENSILDISGFSKQYNCAFIWQKDGVKKLNLYLIINYFKGGKLRFKKIKPEAFEANRFYTVINKKSGEIVPMEVNFNFDDPNLIILPLAFGKRQGREFIWNDLLSLETGSLKLANGRVIEKTLYNRRTRQDEPALFVALTFERREVLDSSNIKPMNLIGIDRGENIPAVIALTDPEGCPLSRFKDSLGNPTHILIIGESYKEKQRTIQAAKEVEQRRAGGYSRKYASKAKNLADDMVRNTARDLLYYAVTQDAMLIFENLSRGFGRQGKRTFMAERQYTRMEDWLTAKLAYEGLPSKTYLSKTLAQYTSKTCSNCGFTITSADYDRVLEKLKKTATGWMTTINGKELKVEGQITYYNRYKRQNVVKDLSVELDRLSEESVNNDISSWTKGRSGEALSLLKKRFSHRPVQEKFVCLNCGFETHADEQAALNIARSWLFLRSQEYKKYQTNKTTGNTDKRAFVETWQSFYRKKLKEVWKPAV

SEQ ID NO: 4020 - protein, 978 aa, Artificial Sequence
  CasX Protein Variant
MQEIKRINKIRRRLVKDSNTKKAGKTGPRKTLLVRVMTPDLRERLENLRKKPENIPQPISNTSRANLNKLLTDYTEMKKAILHVYWEEFQKDPVGLMSRVAQPAPKNIDQRKLIPVKDGNERLTSSGFACSQCCQPLYVYKLEQVNDKGKPHTNYFGRCNVSEHERLILLSPHKPEANDELVTYSLGKFGQRALDFYSIHVTRESNHPVKPLEQIGGNSCASGPVGKALSDACMGAVASFLTKYQDIILEHQKVIKKNEKRLANLKDIASANGLAFPKITLPPQPHTKEGIEAYNNVVAQIVIWVNLNLWQKLKIGRDEAKPLQRLKGFPSFPLVERQANEVDWWDMVCNVKKLINEKKEDGKVFWQNLAGYKRQEALLPYLSSEEDRKKGKKFARYQFGDLLLHLEKKHGEDWGKVYDEAWERIDKKVEGLSKHIKLEEERRSEDAQSKAALTDWLRAKASFVIEGLKEADKDEFCRCELKLQKWYGDLRGKPFAIEAENSILDISGFSKQYNCAFIWQKDGVKKLNLYLIINYFKGGKLRFKKIKPEAFEANRFYTVINKKSGEIVPMEVNFNFDDPNLIILPLAFGKRQGREFIWNDLLSLETGSLKLANGRVIEKTLYNRRTRQDEPALFVALTFERREVLDSSNIKPMNLIGIDRGENIPAVIALTDPEGCPLSRFKDSLGNPTHILRIGESYKEKQRTIQAAKEVEQRRAGGYSRKYASKAKNLADDMVRNTARDLLYYAVTQDAMLIFENLSRGFGRQGKRTFMAERQYTRMEDWLTAKLAYEGLPSKTYLSKTLAQYTSKTCSNCGFTITSADYDRVLEKLKKTATGWMTTINGKELKVEGQITYYNRYKRQNVVKDLSVELDRLSEESVNNDISSWTKGRSGEALSLLKKRFSHRPVQEKFVCLNCGFETHADEQAALNIARSWLFLRSQEYKKYQTNKTTGNTDKRAFVETWQSFYRKKLKEVWKPAV

SEQ ID NO: 4021 - protein, 978 aa, Artificial Sequence
  CasX Protein Variant
MQEIKRINKIRRRLVKDSNTKKAGKTGPMKTLLVRVMTPDLRERLENLRKKPENIPQPISNTSRANLNKLLTDYTEMKKAILHVYWEEFQKDPVGLMSRVAQPAPKNIDQRKLIPVKDGNERLTSSGFACSQCCQPLYVYKLEQVNDKGKPHTNYFGRCNVSEHERLILLSPHKPEANDELVTYSLGKFGQRALDFYSIHVTRESNHPVKPLEQIGGNSCASGPVGKALSDACMGAVASFLTKYQDIILEHQKVIKKNEKRLANLKDIASANGLAFPKITLPPQPHTKEGIEAYNNVVAQIVIWVNLNLWQKLKIGRDEAKPLQRLKGFPSFPLVERQANEVDWWDMVCNVKKLINEKKEDGKVFWQNLAGYKRQEALLPYLSSEEDRKKGKKFARYQFGDLLLHLEKKHGEDWGKVYDEAWERIDKKVEGLSKHIKLEEERRSEDAQSKAALTDWLRAKASFVIEGLKEADKDEFCRCELKLQKWYGDLRGKPFAIEAENSILDISGFSKQYNCAFIWQKDGVKKLNLYLIINYFKGGKLRFKKIKPEAFEANRFYTVINKKSGEIVPMEVNFNFDDPNLIILPLAFGKRQGREFIWNDLLSLETGSLKLANGRVIEKTLYNRRTRQDEPALFVALTFERREVLDSSNIKPMNLIGIDRGENIPAVIALTDPEGCPLSRFKDSLGNPTHILRIGESYKEKQRTIQAAKEVEQRRAGGYSRKYASKAKNLADDMVRNTARDLLYYAVTQDAMLIFENLSRGFGRQGKRTFMAERQYTRMEDWLTAKLAYEGLPSKTYLSKTLAQYTSKTCSNCGFTITSADYDRVLEKLKKTATGWMTTINGKELKVEGQITYYNRYKRQNVVKDLSVELDRLSEESVNNDISSWTKGRSGEALSLLKKRFSHRPVQEKFVCLNCGFETHADEQAALNIARSWLFLRSQEYKKYQPNKTTGNTDKRAFVETWQSFYRKKLKEVWKPAV

SEQ ID NO: 4022 - protein, 979 aa, Artificial Sequence
  CasX Protein Variant
MQEIKRINKIRRRLVKDSNTKKAGKTGPMKTLLVRVMTPDLRERLENLRKKPENIPQPISNTSRANLNKLLTDYTEMKKAILHVYWEEFQKDPVGLMSRVAQPAPKNIDQRKLIPVKDGNERLTSSGFACSQCCQPLYVYKLEQVNDKGKPHTNYFGRCNVSEHERLILLSPHKPEANDELVTYSLGKFGQRALDFYSIHVTRESNHPVKPLEQIGGNSCASGPVGKALSDACMGAVASFLTKYQDIILEHQKVIKKNEKRLANLKDIASANGLAFPKITLPPQPHTKEGIEAYNNVVAQIVIWVNLNLWQKLKIGRDEAKPLQRLKGFPSFPLVERQANEVDWWDMVCNVKKLINEKKEDGKVFWQNLAGYKRQEALLPYLSSEEDRKKGKKFARYQFGDLLLHLEKKHGEDWGKVYDEAWERIDKKVEGLSKHIKLEEERRSEDAQSKAALTDWLRAKASFVIEGLKEADKDEFCRCELKLQKWYGDLRGKPFAIEAENSILDISGFSKQYNCAFIWQKDGVKKLNLYLIINYFKGGKLRFKKIKPEAFEANRFYTVINKKSGEIVPMEVNFNFDDPNLIILPLAFGKRQGREFIWNDLLSLETGSLKLANGRVIEKTLYNRRTRQDEPALFVALTFERREVLDSSNIKPMNLIGIDRGENIPAVIALTDPEGCPLSRFKDSLGNPTHILRIGESYKEKQRTIQAAKEVEQRRAGGYSRKYASKAKNLADDMVRNTARDLLYYAVTQDAMLIFENLSRGFGRQGKRTFMAERQYTRMEDWLTAKLAYEGLPSKTYLSKTLAQYTSKTCSNCGFTITSADYDRVLEKLKKTATGWMTTINGKELKVEGQITYYNRYKRQNVVKDLSVELDRLSEESVNNDISSWTKGLRSGEALSLLKKRFSHRPVQEKFVCLNCGFETHADEQAALNIARSWLFLRSQEYKKYQTNKTTGNTDKRAFVETWQSFYRKKLKEVWKPAV

SEQ ID NO: 4023 - protein, 978 aa, Artificial Sequence
  CasX Protein Variant
MQEIKRINKIRRRLVKDSNTKKAGKTGPMKTLLVRVMTPDLRERLENLRKKPENIPQPISNTSRANLNKLLTDYTEMKKAILHVYWEEFQKDPVGLMSRVAQPAPKNIDQRKLIPVKDGNDRLTSSGFACSQCCQPLYVYKLEQVNDKGKPHTNYFGRCNVSEHERLILLSPHKPEANDELVTYSLGKFGQRALDFYSIHVTRESNHPVKPLEQIGGNSCASGPVGKALSDACMGAVASFLTKYQDIILEHQKVIKKNEKRLANLKDIASANGLAFPKITLPPQPHTKEGIEAYNNVVAQIVIWVNLNLWQKLKIGRDEAKPLQRLKGFPSFPLVERQANEVDWWDMVCNVKKLINEKKEDGKVFWQNLAGYKRQEALLPYLSSEEDRKKGKKFARYQFGDLLLHLEKKHGEDWGKVYDEAWERIDKKVEGLSKHIKLEEERRSEDAQSKAALTDWLRAKASFVIEGLKEADKDEFCRCELKLQKWYGDLRGKPFAIEAENSILDISGFSKQYNCAFIWQKDGVKKLNLYLIINYFKGGKLRFKKIKPEAFEANRFYTVINKKSGEIVPMEVNFNFDDPNLIILPLAFGKRQGREFIWNDLLSLETGSLKLANGRVIEKTLYNRRTRQDEPALFVALTFERREVLDSSNIKPMNLIGIDRGENIPAVIALTDPEGCPLSRFKDSLGNPTHILRIGESYKEKQRTIQAAKEVEQRRAGGYSRKYASKAKNLADDMVRNTARDLLYYAVTQDAMLIFENLSRGFGRQGKRTFMAERQYTRMEDWLTAKLAYEGLPSKTYLSKTLAQYTSKTCSNCGFTITSADYDRVLEKLKKTATGWMTTINGKELKVEGQITYYNRYKRQNVVKDLSVELDRLSEESVNNDISSWTKGRSGEALSLLKKRFSHRPVQEKFVCLNCGFETHADEQAALNIARSWLFLRSQEYKKYQTNKTTGNTDKRAFVETWQSFYRKKLKEVWKPAV

SEQ ID NO: 4024 - protein, 978 aa, Artificial Sequence
  CasX Protein Variant
MQEIKRINKIRRRLVKDSNTKKAGKTGPMKTLLVRVMTPDLRERLENLRKKPENIPQPISNTSRANLNKLLTDYTEMKKAILHVYWEEFQKDPVGLMSRVAQPAPKNIDQRKLIPVKDGNERLTSSGFACSQCCQPLYVYKLEQVNDKGKPHTNYFGRCNVSEHERLILLSPHKPEANDELVTYSLGKFGQRALDFYSIHVTRESNHPVKPLEQIGGNSCASGKVGKALSDACMGAVASFLTKYQDIILEHQKVIKKNEKRLANLKDIASANGLAFPKITLPPQPHTKEGIEAYNNVVAQIVIWVNLNLWQKLKIGRDEAKPLQRLKGFPSFPLVERQANEVDWWDMVCNVKKLINEKKEDGKVFWQNLAGYKRQEALLPYLSSEEDRKKGKKFARYQFGDLLLHLEKKHGEDWGKVYDEAWERIDKKVEGLSKHIKLEEERRSEDAQSKAALTDWLRAKASFVIEGLKEADKDEFCRCELKLQKWYGDLRGKPFAIEAENSILDISGFSKQYNCAFIWQKDGVKKLNLYLIINYFKGGKLRFKKIKPEAFEANRFYTVINKKSGEIVPMEVNFNFDDPNLIILPLAFGKRQGREFIWNDLLSLETGSLKLANGRVIEKTLYNRRTRQDEPALFVALTFERREVLDSSNIKPMNLIGIDRGENIPAVIALTDPEGCPLSRFKDSLGNPTHILRIGESYKEKQRTIQAAKEVEQRRAGGYSRKYASKAKNLADDMVRNTARDLLYYAVTQDAMLIFENLSRGFGRQGKRTFMAERQYTRMEDWLTAKLAYEGLPSKTYLSKTLAQYTSKTCSNCGFTITSADYDRVLEKLKKTATGWMTTINGKELKVEGQITYYNRYKRQNVVKDLSVELDRLSEESVNNDISSWTKGRSGEALSLLKKRFSHRPVQEKFVCLNCGFETHADEQAALNIARSWLFLRSQEYKKYQTNKTTGNTDKRAFVETWQSFYRKKLKEVWKPAV

SEQ ID NO: 4025 - protein, 978 aa, Artificial Sequence
  CasX Protein Variant
MQEIKRINKIRRRLVKDSNTKKAGKTGPMKTLLVRVMTPDLRERLENLRKKPENIPQPISNTSRANLNKLLTDYTEMKKAILHVYWEEFQKDPVGLMSRVAQPAPKNIDQRKLIPVKDGNERLTSSGFACSQCCQPLYVYKLEQVNDKGKPHTNYFGRCNVSEHERLILLSPHKPEANDELVTYSLGKFGQRALDFYSIHVTRESNHPVKPLEQIGGNSCASGPVGKALSDACMGAVASFLTKYQDIILEHQKVIKKNEKRLANLKDIASANGLAFPKITLPPQPHTKEGIEAYNNVVAQIVIWVNLNLWQKLKIGRDEAKPLQRLKGFPSFPLVERQANEVDWWDMVCNVKKLINEKKEDGKVFWQNLAGYKRQEALLPYLSSEEDRKKGKKFARYQFGDLLLHLEKKHGEDWGKVYDEAWERIDKKVEGLSKHIKLEEERRSEDAQSKAALTDWLRAKASFVIEGLKEADKDEFCRCELKLQKWYGDLRGKPFAIEAENSILDISGFSKQYNCAFIWQKDGVKKLNLYLIINYFKGGKLRFKKIKPEAFEANRFYTVINKKSGEIVPMEVNFNFDDPNLIILPLAFGKRQGREFIWNDLLSLETGSLKLANGRVIEKTLYNRRTRQDEPALFVALTFERREVLDSSNIKPMNLIGIDRGENIPAVIALTDPEGCPLSRFKDSLGNPTHILRIGESYKEKQRTIQAAKEVEQRRAGGYSRKYASKAKNLADDMVRNTARDLLYYAVTQDAMLIFENLSRGFGRQGRRTFMAERQYTRMEDWLTAKLAYEGLPSKTYLSKTLAQYTSKTCSNCGFTITSADYDRVLEKLKKTATGWMTTINGKELKVEGQITYYNRYKRQNVVKDLSVELDRLSEESVNNDISSWTKGRSGEALSLLKKRFSHRPVQEKFVCLNCGFETHADEQAALNIARSWLFLRSQEYKKYQTNKTTGNTDKRAFVETWQSFYRKKLKEVWKPAV

SEQ ID NO: 4026 - protein, 978 aa, Artificial Sequence
  CasX Protein Variant
MQEIKRINKIRRRLVKDSNTKKAGKTGPMKTLLVRVMTPDLRERLENLRKKPENIPQPISNTSRANLNKLLTDYTEMKKAILHVYWEEFQKDPVGLMSRVAQPAPKNIDQRKLIPVKDGNERLTSSGFACSQCCQPLYVYKLEQVNDKGKPHTNYFGRCNVSEHERLILLSPHKPEANDELVTYSLGKFGQRALDFYSIHVTRESNHPVKPLEQIGGNSCASGPVGKALSDACMGAVASFLTKYQDIILEHQKVIKKNEKRLANLKDIASANGLAFPKITLPPQPHTKEGIEAYNNVVAQIVIWVNLNLWQKLKIGRDEAKPLQRLKGFPSFPLVERQANEVDWWDMVCNVKKLINEKKEDGKVFWQNLAGYKRQEALLPYLSSEEDRKKGKKFARYQFGDLLLHLEKKHGEDWGKVYDEAWERIDKKVEGLSKHIKLEEERRSEDAQSKAALTDWLRAKASFVIEGLKEADKDEFCRCKLKLQKWYGDLRGKPFAIEAENSILDISGFSKQYNCAFIWQKDGVKKLNLYLIINYFKGGKLRFKKIKPEAFEANRFYTVINKKSGEIVPMEVNFNFDDPNLIILPLAFGKRQGREFIWNDLLSLETGSLKLANGRVIEKTLYNRRTRQDEPALFVALTFERREVLDSSNIKPMNLIGIDRGENIPAVIALTDPEGCPLSRFKDSLGNPTHILRIGESYKEKQRTIQAAKEVEQRRAGGYSRKYASKAKNLADDMVRNTARDLLYYAVTQDAMLIFENLSRGFGRQGKRTFMAERQYTRMEDWLTAKLAYEGLPSKTYLSKTLAQYTSKTCSNCGFTITSADYDRVLEKLKKTATGWMTTINGKELKVEGQITYYNRYKRQNVVKDLSVELDRLSEESVNNDISSWTKGRSGEALSLLKKRFSHRPVQEKFVCLNCGFETHADEQAALNIARSWLFLRSQEYKKYQTNKTTGNTDKRAFVETWQSFYRKKLKEVWKPAV

SEQ ID NO: 4027 - protein, 978 aa, Artificial Sequence
  CasX Protein Variant
MQEIKRINKIRRRLVKDSNTKKAGKTGPMKTLLVRVMTPDLRERLENLRKKPENIPQPISNTSRANLNKLLTDYTEMKKAILHVYWEEFQKDPVGLMSRVAQPAPKNIDQRKLIPVKDGNERLTSSGFACSQCCQPLYVYKLEQVNDKGKPHTNYFGRCNVSEHERLILLSPHKPEANDELVTYSLGKFGQRALDFYSIHVTRESNHPVKPLEQIGGNSCASGPVGKALSDACMGAVASFLTKYQDIILEHQKVIKKNEKRLANLKDIASANGLAFPKITLPPQPHTKEGIEAYNNVVAQIVIWVNLNLWQKLKIGRDEAKPLQRLKGFPSFPLVERQANEVDWWDMVCNVKKLINEKKEDGKVFWQNLAGYKRQEALLPYLSSEEDRKKGKKFARYQFGDLLLHLEKKHGEDWGKVYDEAWERIDKKVEGLSKHIKLEEERRSEDAQSKAALTDWLRAKASFVIEGLKEADKDEFCRCELKLQKWYGDLRGKPFAIEAENSILDISGFSKQYNCAFIWQKDGVKKLNLYLIINYFKGGKLRFKKVKPEAFEANRFYTVINKKSGEIVPMEVNFNFDDPNLIILPLAFGKRQGREFIWNDLLSLETGSLKLANGRVIEKTLYNRRTRQDEPALFVALTFERREVLDSSNIKPMNLIGIDRGENIPAVIALTDPEGCPLSRFKDSLGNPTHILRIGESYKEKQRTIQAAKEVEQRRAGGYSRKYASKAKNLADDMVRNTARDLLYYAVTQDAMLIFENLSRGFGRQGKRTFMAERQYTRMEDWLTAKLAYEGLPSKTYLSKTLAQYTSKTCSNCGFTITSADYDRVLEKLKKTATGWMTTINGKELKVEGQITYYNRYKRQNVVKDLSVELDRLSEESVNNDISSWTKGRSGEALSLLKKRFSHRPVQEKFVCLNCGFETHADEQAALNIARSWLFLRSQEYKKYQTNKTTGNTDKRAFVETWQSFYRKKLKEVWKPAV

SEQ ID NO: 4028 - protein, 978 aa, Artificial Sequence
  CasX Protein Variant
MQEIKRINKIRRRLVKDSNTKKAGKTGPMKTLLVRVMTPDLRERLENLRKKPENIPQPISNTSRANLNKLLTDYTEMKKAILHVYWEEFQKDPVGLMSRVAQPAPKNIDQRKLIPVKDGNERLTSSGFACSQCCQPLYVYKLEQVNDKGKPHTNYFGRCNVSEHERLILLSPHKPEANDELVTYSLGEFGQRALDFYSIHVTRESNHPVKPLEQIGGNSCASGPVGKALSDACMGAVASFLTKYQDIILEHQKVIKKNEKRLANLKDIASANGLAFPKITLPPQPHTKEGIEAYNNVVAQIVIWVNLNLWQKLKIGRDEAKPLQRLKGFPSFPLVERQANEVDWWDMVCNVKKLINEKKEDGKVFWQNLAGYKRQEALLPYLSSEEDRKKGKKFARYQFGDLLLHLEKKHGEDWGKVYDEAWERIDKKVEGLSKHIKLEEERRSEDAQSKAALTDWLRAKASFVIEGLKEADKDEFCRCELKLQKWYGDLRGKPFAIEAENSILDISGFSKQYNCAFIWQKDGVKKLNLYLIINYFKGGKLRFKKIKPEAFEANRFYTVINKKSGEIVPMEVNFNFDDPNLIILPLAFGKRQGREFIWNDLLSLETGSLKLANGRVIEKTLYNRRTRQDEPALFVALTFERREVLDSSNIKPMNLIGIDRGENIPAVIALTDPEGCPLSRFKDSLGNPTHILRIGESYKEKQRTIQAAKEVEQRRAGGYSRKYASKAKNLADDMVRNTARDLLYYAVTQDAMLIFENLSRGFGRQGKRTFMAERQYTRMEDWLTAKLAYEGLPSKTYLSKTLAQYTSKTCSNCGFTITSADYDRVLEKLKKTATGWMTTINGKELKVEGQITYYNRYKRQNVVKDLSVELDRLSEESVNNDISSWTKGRSGEALSLLKKRFSHRPVQEKFVCLNCGFETHADEQAALNIARSWLFLRSQEYKKYQTNKTTGNTDKRAFVETWQSFYRKKLKEVWKPAV

SEQ ID NO: 4029 - protein, 978 aa, Artificial Sequence
  CasX Protein Variant
MQEIKRINKIRRRLVKDSNTKKAGKTGPMKTLLVRVMTPDLRERLENLRKKPENIPQPISNTSRANLNKLLTDYTEMKKAILHVYWEEFQKDPVGLMSRVAQPAPKNIDQRKLIPVKDGNERLTSSGFACSQCCQPLYVYKLEQVNDKGKPHTNYFGRCNVSEHERLILLSPHKPEANDELVTYSLGKFGQRALDFYSIHVTRESNHPVKPLEQIGGNSCASGPVGKALSDACMGAVASFLTKYQDIILEHQKVIKKNEKRLANLKDIASANGLAFPKITLPPQPHTKEGIEAYNNVVAQIVIWVNLNLWQKLKIGRDEAKPLQRLKGFPSFPLVERQANEVDWWDMVCNVKKLINEKKEDGKVFWQNLAGYKRQEALLPYLSSEEDRKKGKKFARYQFGDLLLHLEKKHGEDWGKVYDEAWERIDKKVEGLSKHIKLEEERRSEDAQSKAALTDWLRAKASFVIEGLKEADKDEFCRCELKLQKWYGDLRGKPFAIEAENSILDISGFSKQYNCAFIWQKDGVKKLNLYLIINYFKGGKLRFKKIKPEAFEANRFYTVINKKSGEIVPMEVNFNFDDPNLIILPLAFGKRQGREFIWNDLLSLETGSLKLANGRVIEKTLYNRRTRQDEPALFVALTFERREVLDSSNIKPMNLIGIDRGENIPAVIALTDPEGCPLSRFKDSLGNPTHILRIGESYKEKQRTIQAAKEVEQRRAGGYSRKYASKAKNLADDMVRNTARDLLYYAVTQDAMLIFENLSRGFGRQGKRTFMAERQYTRMEDWLTAKLATEGLPSKTYLSKTLAQYTSKTCSNCGFTITSADYDRVLEKLKKTATGWMTTINGKELKVEGQITYYNRYKRQNVVKDLSVELDRLSEESVNNDISSWTKGRSGEALSLLKKRFSHRPVQEKFVCLNCGFETHADEQAALNIARSWLFLRSQEYKKYQTNKTTGNTDKRAFVETWQSFYRKKLKEVWKPAV

SEQ ID NO: 4030 - protein, 978 aa, Artificial Sequence
  CasX Protein Variant
MQEIKRINKIRRRLVKDSNTKKAGKTGPMKTLLVRVMTPDLRERLENLRKKPENIPQPISNTSRANLNKLLTDYTEMKKAILHVYWEEFQKDPVGLMSRVAQPAPKNIDQRKLIPVKDGNERLTSSGFACSQCCQPLYVYKLEQVNDKGKPHTNYFGRCNVSEHERLILLSPHKPEANDELVTYSLGKFGQRALDFYSIHVTRESNHPVKPLEQIGGNSCASGPVGKALSDACMGAVASFLTKYQDIILEHQKVIKKNEKRLANLKDIASANGLAFPKITLPPQPHTKEGIEAYNNVVAQIVIWVNLNLWQKLKIGRDEAKPLQRLKGFPSFPLVERQANEVDWWDMVCNVKKLINEKKEDGKVFWQNLAGYKRQEALLPYLSSEEDRKKGKKFARYQFGDLLLHLEKKHGEDWGKVYDEAWERIDKKVEGLSKHIKLEEERRSEDAQSKAALTDWLRAKASFVIEGLKEADKDEFCRCELKLQKWYGDLRGKPSAIEAENSILDISGFSKQYNCAFIWQKDGVKKLNLYLIINYFKGGKLRFKKIKPEAFEANRFYTVINKKSGEIVPMEVNFNFDDPNLIILPLAFGKRQGREFIWNDLLSLETGSLKLANGRVIEKTLYNRRTRQDEPALFVALTFERREVLDSSNIKPMNLIGIDRGENIPAVIALTDPEGCPLSRFKDSLGNPTHILRIGESYKEKQRTIQAAKEVEQRRAGGYSRKYASKAKNLADDMVRNTARDLLYYAVTQDAMLIFENLSRGFGRQGKRTFMAERQYTRMEDWLTAKLAYEGLPSKTYLSKTLAQYTSKTCSNCGFTITSADYDRVLEKLKKTATGWMTTINGKELKVEGQITYYNRYKRQNVVKDLSVELDRLSEESVNNDISSWTKGRSGEALSLLKKRFSHRPVQEKFVCLNCGFETHADEQAALNIARSWLFLRSQEYKKYQTNKTTGNTDKRAFVETWQSFYRKKLKEVWKPAV

SEQ ID NO: 4031 - protein, 978 aa, Artificial Sequence
  CasX Protein Variant
MQEIKRINKIRRRLVKDSNTKKAGKTGPEKTLLVRVMTPDLRERLENLRKKPENIPQPISNTSRANLNKLLTDYTEMKKAILHVYWEEFQKDPVGLMSRVAQPAPKNIDQRKLIPVKDGNERLTSSGFACSQCCQPLYVYKLEQVNDKGKPHTNYFGRCNVSEHERLILLSPHKPEANDELVTYSLGKFGQRALDFYSIHVTRESNHPVKPLEQIGGNSCASGPVGKALSDACMGAVASFLTKYQDIILEHQKVIKKNEKRLANLKDIASANGLAFPKITLPPQPHTKEGIEAYNNVVAQIVIWVNLNLWQKLKIGRDEAKPLQRLKGFPSFPLVERQANEVDWWDMVCNVKKLINEKKEDGKVFWQNLAGYKRQEALLPYLSSEEDRKKGKKFARYQFGDLLLHLEKKHGEDWGKVYDEAWERIDKKVEGLSKHIKLEEERRSEDAQSKAALTDWLRAKASFVIEGLKEADKDEFCRCELKLQKWYGDLRGKPFAIEAENSILDISGFSKQYNCAFIWQKDGVKKLNLYLIINYFKGGKLRFKKIKPEAFEANRFYTVINKKSGEIVPMEVNFNFDDPNLIILPLAFGKRQGREFIWNDLLSLETGSLKLANGRVIEKTLYNRRTRQDEPALFVALTFERREVLDSSNIKPMNLIGIDRGENIPAVIALTDPEGCPLSRFKDSLGNPTHILRIGESYKEKQRTIQAAKEVEQRRAGGYSRKYASKAKNLADDMVRNTARDLLYYAVTQDAMLIFENLSRGFGRQGKRTFMAERQYTRMEDWLTAKLAYEGLPSKTYLSKTLAQYTSKTCSNCGFTITSADYDRVLEKLKKTATGWMTTINGKELKVEGQITYYNRYKRQNVVKDLSVELDRLSEESVNNDISSWTKGRSGEALSLLKKRFSHRPVQEKFVCLNCGFETHADEQAALNIARSWLFLRSQEYKKYQTNKTTGNTDKRAFVETWQSFYRKKLKEVWKPAV

SEQ ID NO: 4032 - protein, 978 aa, Artificial Sequence
  CasX Protein Variant
MQEIKRINKIRRRLVKDSNTKKAGKTGPMKTLLVRVMTPDLRERLENLRKKPENIPQPISNTSRANLNKLLTDYTEMKKAILHVYWEEFQKDPVGLMSRVAQPAPKNIDQRKLIPVKDGNERLTSSGFACSQCCQPLYVYKLEQVNDKGKPHTNYFGRCNVSEHERLILLSPHKPEANDELVTYSLGKFGQRALDFYSIHVTRESNHPVKPLEQIGGNSCASGPVGKALSDACMGAVTSFLTKYQDIILEHQKVIKKNEKRLANLKDIASANGLAFPKITLPPQPHTKEGIEAYNNVVAQIVIWVNLNLWQKLKIGRDEAKPLQRLKGFPSFPLVERQANEVDWWDMVCNVKKLINEKKEDGKVFWQNLAGYKRQEALLPYLSSEEDRKKGKKFARYQFGDLLLHLEKKHGEDWGKVYDEAWERIDKKVEGLSKHIKLEEERRSEDAQSKAALTDWLRAKASFVIEGLKEADKDEFCRCELKLQKWYGDLRGKPFAIEAENSILDISGFSKQYNCAFIWQKDGVKKLNLYLIINYFKGGKLRFKKIKPEAFEANRFYTVINKKSGEIVPMEVNFNFDDPNLIILPLAFGKRQGREFIWNDLLSLETGSLKLANGRVIEKTLYNRRTRQDEPALFVALTFERREVLDSSNIKPMNLIGIDRGENIPAVIALTDPEGCPLSRFKDSLGNPTHILRIGESYKEKQRTIQAAKEVEQRRAGGYSRKYASKAKNLADDMVRNTARDLLYYAVTQDAMLIFENLSRGFGRQGKRTFMAERQYTRMEDWLTAKLAYEGLPSKTYLSKTLAQYTSKTCSNCGFTITSADYDRVLEKLKKTATGWMTTINGKELKVEGQITYYNRYKRQNVVKDLSVELDRLSEESVNNDISSWTKGRSGEALSLLKKRFSHRPVQEKFVCLNCGFETHADEQAALNIARSWLFLRSQEYKKYQTNKTTGNTDKRAFVETWQSFYRKKLKEVWKPAV

SEQ ID NO: 4033 - protein, 978 aa, Artificial Sequence
  CasX Protein Variant
MQEIKRINKIRRRLVKDSNTKKAGKTGPMKTLLVRVMTPDLRERLENLRKKPENIPQPISNTSRANLNKLLTDYTEMKKAILHVYWEEFQKDPVGLMSRVAQPAPKNIDQRKLIPVKDGNERLTSSGFACSQCCQPLYVYKLEQVNDKGKPHTNYFGRCNVSEHERLILLSPHKPEANDELVTYSLGKFGQRALDFYSIHVTRESNHPVKPLEQIGGNSCASGPVGKALSNACMGAVASFLTKYQDIILEHQKVIKKNEKRLANLKDIASANGLAFPKITLPPQPHTKEGIEAYNNVVAQIVIWVNLNLWQKLKIGRDEAKPLQRLKGFPSFPLVERQANEVDWWDMVCNVKKLINEKKEDGKVFWQNLAGYKRQEALLPYLSSEEDRKKGKKFARYQFGDLLLHLEKKHGEDWGKVYDEAWERIDKKVEGLSKHIKLEEERRSEDAQSKAALTDWLRAKASFVIEGLKEADKDEFCRCELKLQKWYGDLRGKPFAIEAENSILDISGFSKQYNCAFIWQKDGVKKLNLYLIINYFKGGKLRFKKIKPEAFEANRFYTVINKKSGEIVPMEVNFNFDDPNLIILPLAFGKRQGREFIWNDLLSLETGSLKLANGRVIEKTLYNRRTRQDEPALFVALTFERREVLDSSNIKPMNLIGIDRGENIPAVIALTDPEGCPLSRFKDSLGNPTHILRIGESYKEKQRTIQAAKEVEQRRAGGYSRKYASKAKNLADDMVRNTARDLLYYAVTQDAMLIFENLSRGFGRQGKRTFMAERQYTRMEDWLTAKLAYEGLPSKTYLSKTLAQYTSKTCSNCGFTITSADYDRVLEKLKKTATGWMTTINGKELKVEGQITYYNRYKRQNVVKDLSVELDRLSEESVNNDISSWTKGRSGEALSLLKKRFSHRPVQEKFVCLNCGFETHADEQAALNIARSWLFLRSQEYKKYQTNKTTGNTDKRAFVETWQSFYRKKLKEVWKPAV

SEQ ID NO: 4034 - protein, 978 aa, Artificial Sequence
  CasX Protein Variant
MQEIKRINKIRRRLVKDSNTKKAGKTGPMKTLLVRVMTPDLRERLENLRKKPENIPQPISNTSRANLNKLLTDYTEMKKAILHVYWEEFQKDPVGLMSRVAQPAPKNIDQRKLIPVKDGNERLTSSGFACSQCCQPLYVYKLEQVNDKGKPHTNYFGRCNVSEHERLILLSPHKPEANDELVTYSLGKFGQRALDFYSFHVTRESNHPVKPLEQIGGNSCASGPVGKALSDACMGAVASFLTKYQDIILEHQKVIKKNEKRLANLKDIASANGLAFPKITLPPQPHTKEGIEAYNNVVAQIVIWVNLNLWQKLKIGRDEAKPLQRLKGFPSFPLVERQANEVDWWDMVCNVKKLINEKKEDGKVFWQNLAGYKRQEALLPYLSSEEDRKKGKKFARYQFGDLLLHLEKKHGEDWGKVYDEAWERIDKKVEGLSKHIKLEEERRSEDAQSKAALTDWLRAKASFVIEGLKEADKDEFCRCELKLQKWYGDLRGKPFAIEAENSILDISGFSKQYNCAFIWQKDGVKKLNLYLIINYFKGGKLRFKKIKPEAFEANRFYTVINKKSGEIVPMEVNFNFDDPNLIILPLAFGKRQGREFIWNDLLSLETGSLKLANGRVIEKTLYNRRTRQDEPALFVALTFERREVLDSSNIKPMNLIGIDRGENIPAVIALTDPEGCPLSRFKDSLGNPTHILRIGESYKEKQRTIQAAKEVEQRRAGGYSRKYASKAKNLADDMVRNTARDLLYYAVTQDAMLIFENLSRGFGRQGKRTFMAERQYTRMEDWLTAKLAYEGLPSKTYLSKTLAQYTSKTCSNCGFTITSADYDRVLEKLKKTATGWMTTINGKELKVEGQITYYNRYKRQNVVKDLSVELDRLSEESVNNDISSWTKGRSGEALSLLKKRFSHRPVQEKFVCLNCGFETHADEQAALNIARSWLFLRSQEYKKYQTNKTTGNTDKRAFVETWQSFYRKKLKEVWKPAV

SEQ ID NO: 4035 - protein, 978 aa, Artificial Sequence
  CasX Protein Variant
MQEIKRINKIRRRLVKDSNTKKAGKTGPMKTLLVRVMTPDLRERLENLRKKPENIPQPISNTSRANLNKLLTDYTEMKKAILHVYWEEFQKDPVGLMSRVAQPAPKNIDQRKLIPVKDGNERLTSSGFACSQCCQPLYVYKLEQVNDKGKPHTNYFGRCNVSEHERLILLSPHKPEANDELVTYSLGKFGQRALDFYSIHVTRESNHPVKPLEQIGGNSCASGPVGKALSDACMGAVASFLTKYQDIILEHQKVIKKNEKRLANLKDIASANGLAFPKITLPPQPHTKEGIEAYNNVVAQIVIWVNLNLWQKLKIGRDEAKPLQRLKGFPSFPLVERQANEVDWWDMVCNVKKLINEKKEDGKVFWQNLAGYKRQEALLPYLSSEEDRKKGKKFARYQFGDLLLHLEKKHGEDWGKVYDEAWERIDKKVEGLSKHIKLEEERRSEDAQSKAALTDWLRAKASFVIEGLKEADKDEFCRCELKLQKWYGDLRGKPFAIEAENSILDISGFSKQYNCAFIWQKDGVKKLNLYLIINYFKGGKLRFKKIKPEAFEANRFYTVINKKSGEIVPMEVNFNFDDPNLIILPLAFGKRQGREFIWNDLLSLETGSLKLANGRVIEKTLYNRRTRQDEPALFVALTFERREVLDSSNIKPMNLIGIDRGENIPAVIALTDPEGCPLSRFKDSLGNPTHILRIGESYKEKQRTIQAAKEVEQRRAGGYSRKYASKAKNLADDMVRSTARDLLYYAVTQDAMLIFENLSRGFGRQGKRTFMAERQYTRMEDWLTAKLAYEGLPSKTYLSKTLAQYTSKTCSNCGFTITSADYDRVLEKLKKTATGWMTTINGKELKVEGQITYYNRYKRQNVVKDLSVELDRLSEESVNNDISSWTKGRSGEALSLLKKRFSHRPVQEKFVCLNCGFETHADEQAALNIARSWLFLRSQEYKKYQTNKTTGNTDKRAFVETWQSFYRKKLKEVWKPAV

SEQ ID NO: 4036 - protein, 979 aa, Artificial Sequence
  CasX Protein Variant
MQEIKRINKIRRRLVKDSNTKKAGKTGPMKTLLVRVMTPDLRERLENLRKKPENIPQPISNTSRANLNKLLTDYTEMKKAILHVYWEEFQKDPVGLMSRVAQPAPKNIDQRKLIPVKDGNERLTSSGFACSQCCQPLYVYKLEQVNDKGKPHTNYFGRCNVSEHERLILLSPHKPEANDELVTYSLGKFGQRALDFYSIHVTRESNHPVKPLEQIGGNSCASGPVGKALSDACMGAVASFLTKYQDIILEHQKVIKKNEKRLANLKDIASANGLAFPKITLPPQPHTKEGIEAYNNVVAQIVIWVNLNLWQKLKIGRDEAKPLQRLKGFPSFPLVERQANEVDWWDMVCNVKKLINEKKEDGKVFWQNLAGYKRQEALLPYLSSEEDRKKGKKFARYQFGDLLLHLEKKHGEDWGKVYDEAWERIDKKVEGLSKHIKLEEERRSEDAQSKAALTDWLRAKASFVIEGLKEADKDEFCRCELKLQKWYGDLRGKPFAIEAENSILDISGFSKQYNCAFIWQKDGVKKLNLYLIINYFKGGKLRFKKIKPEAFEANRFYTVINKKSGEIVPMEVNFNFDDPNLIILPLAFGKRQGREFIWNDLLSLETGSLKLANGRVIEKTLYNRRTRQDEPALFVALTFERREVLDSSNIKPMNLIGIDRAGENIPAVIALTDPEGCPLSRFKDSLGNPTHILRIGESYKEKQRTIQAAKEVEQRRAGGYSRKYASKAKNLADDMVRNTARDLLYYAVTQDAMLIFENLSRGFGRQGKRTFMAERQYTRMEDWLTAKLAYEGLPSKTYLSKTLAQYTSKTCSNCGFTITSADYDRVLEKLKKTATGWMTTINGKELKVEGQITYYNRYKRQNVVKDLSVELDRLSEESVNNDISSWTKGRSGEALSLLKKRFSHRPVQEKFVCLNCGFETHADEQAALNIARSWLFLRSQEYKKYQTNKTTGNTDKRAFVETWQSFYRKKLKEVWKPAV

SEQ ID NO: 4037 - protein, 978 aa, Artificial Sequence
  CasX Protein Variant
MQEIKRINKIRRRLVKDSNTKKAGKTGPMKTLLVRVMTPDLRERLENLRKKPENIPQPISNTSRANLNKLLTDYTEMKKAILHVYWEEFQKDPVGLMSRVAQPAPKNIDQRKLIPVKDGNERLTSSGFACSQCCQPLYVYKLEQVNDKGKPHTNYFGRCNVSEHERLILLSPHKPEANDELVTYSLGKFGQRALDFYSIHVTRESNHPVKPLEQIGGNSCASGPVGKALSDACMGAVASFLTKYQDIILEHQKVIKKNEKRLANLKDIASANGLAFPKITLPPQPHTKEGIEAYNNVVAQIVIWVNLNLWQKLKIGRDEAKPLQRLKGFPSFPLVERQANEVDWWDMVCNVKKLINEKKEDGKVFWQNLAGYKRQEALLPYLSSEEDRKKGKKFARYQFGDLLLHLEKKHGEDWGKVYDEAWERIDKKVEGLSKHIKLEEERRSEDAQSKAALTDWLRANASFVIEGLKEADKDEFCRCELKLQKWYGDLRGKPFAIEAENSILDISGFSKQYNCAFIWQKDGVKKLNLYLIINYFKGGKLRFKKIKPEAFEANRFYTVINKKSGEIVPMEVNFNFDDPNLIILPLAFGKRQGREFIWNDLLSLETGSLKLANGRVIEKTLYNRRTRQDEPALFVALTFERREVLDSSNIKPMNLIGIDRGENIPAVIALTDPEGCPLSRFKDSLGNPTHILRIGESYKEKQRTIQAAKEVEQRRAGGYSRKYASKAKNLADDMVRNTARDLLYYAVTQDAMLIFENLSRGFGRQGKRTFMAERQYTRMEDWLTAKLAYEGLPSKTYLSKTLAQYTSKTCSNCGFTITSADYDRVLEKLKKTATGWMTTINGKELKVEGQITYYNRYKRQNVVKDLSVELDRLSEESVNNDISSWTKGRSGEALSLLKKRFSHRPVQEKFVCLNCGFETHADEQAALNIARSWLFLRSQEYKKYQTNKTTGNTDKRAFVETWQSFYRKKLKEVWKPAV

SEQ ID NO: 4038 - protein, 978 aa, Artificial Sequence
  CasX Protein Variant
MQEIKRINKIRRRLVKDSNTKKAGKTGPMKTLLVRVMTPDLRERLENLRKKPENIPQPISNTSRANLNKLLTDYTEMKKAILHVYWEEFQKDPVGLMSRVAQPAPKNIDQRKLIPVKDGNERLTSSGFACSQCCQPLYVYKLEQVNDKGKPHTNYFGRCNVSEHERLILLSPHKPEANDELVTYSLGKFGQRALDFYSIHVTRESNHPVRPLEQIGGNSCASGPVGKALSDACMGAVASFLTKYQDIILEHQKVIKKNEKRLANLKDIASANGLAFPKITLPPQPHTKEGIEAYNNVVAQIVIWVNLNLWQKLKIGRDEAKPLQRLKGFPSFPLVERQANEVDWWDMVCNVKKLINEKKEDGKVFWQNLAGYKRQEALLPYLSSEEDRKKGKKFARYQFGDLLLHLEKKHGEDWGKVYDEAWERIDKKVEGLSKHIKLEEERRSEDAQSKAALTDWLRAKASFVIEGLKEADKDEFCRCELKLQKWYGDLRGKPFAIEAENSILDISGFSKQYNCAFIWQKDGVKKLNLYLIINYFKGGKLRFKKIKPEAFEANRFYTVINKKSGEIVPMEVNFNFDDPNLIILPLAFGKRQGREFIWNDLLSLETGSLKLANGRVIEKTLYNRRTRQDEPALFVALTFERREVLDSSNIKPMNLIGIDRGENIPAVIALTDPEGCPLSRFKDSLGNPTHILRIGESYKEKQRTIQAAKEVEQRRAGGYSRKYASKAKNLADDMVRNTARDLLYYAVTQDAMLIFENLSRGFGRQGKRTFMAERQYTRMEDWLTAKLAYEGLPSKTYLSKTLAQYTSKTCSNCGFTITSADYDRVLEKLKKTATGWMTTINGKELKVEGQITYYNRYKRQNVVKDLSVELDRLSEESVNNDISSWTKGRSGEALSLLKKRFSHRPVQEKFVCLNCGFETHADEQAALNIARSWLFLRSQEYKKYQTNKTTGNTDKRAFVETWQSFYRKKLKEVWKPAV

SEQ ID NO: 4039 - protein, 978 aa, Artificial Sequence
  CasX Protein Variant
MQEIKRINKIRRRLVKDSNTKKAGKTGPMKTLLVRVMTPDLRERLENLRKKPENIPQPISNTSRANLNKLLTDYTEMKKAILHVYWEEFQKDPVGLMSRVAQPAPKNIDQRKLIPVKDGNERLTSSGFACSQCCQPLYVYKLEQVNDKGKPHTNYFGRCNVSEHERLILLSPHKPEANDELVTYSLGKFGQRALDFYSIHVTRESNHPVKPLEQIGGNSCASGPVGKALSDACMGAVASFLTKYQDIILEHQKVIKKNEKRLANLKDIASANGLAFPKITLPPQPHTKEGIEAYNNVVAQIVIWVNLNLWQKLKIGRDEAKPLQRLKGFPSFPLVERQANEVDWWDMVCNVKKLINEKKEDGKVFWQNLAGYKRQEALLPYLSSEEDRKKGKKFARYQFGDLLLHLEKKHGEDWGKVYDEAWERIDKKVEGLSKHIKLEEERRSEDAQSKAALTDWLRAKASFVIEGLKEADKDEFCRCELKLQKWYGDLRPKPFAIEAENSILDISGFSKQYNCAFIWQKDGVKKLNLYLIINYFKGGKLRFKKIKPEAFEANRFYTVINKKSGEIVPMEVNFNFDDPNLIILPLAFGKRQGREFIWNDLLSLETGSLKLANGRVIEKTLYNRRTRQDEPALFVALTFERREVLDSSNIKPMNLIGIDRGENIPAVIALTDPEGCPLSRFKDSLGNPTHILRIGESYKEKQRTIQAAKEVEQRRAGGYSRKYASKAKNLADDMVRNTARDLLYYAVTQDAMLIFENLSRGFGRQGKRTFMAERQYTRMEDWLTAKLAYEGLPSKTYLSKTLAQYTSKTCSNCGFTITSADYDRVLEKLKKTATGWMTTINGKELKVEGQITYYNRYKRQNVVKDLSVELDRLSEESVNNDISSWTKGRSGEALSLLKKRFSHRPVQEKFVCLNCGFETHADEQAALNIARSWLFLRSQEYKKYQTNKTTGNTDKRAFVETWQSFYRKKLKEVWKPAV

SEQ ID NO: 4040 - protein, 978 aa, Artificial Sequence
  CasX Protein Variant
MQEIKRINKIRRRLVKDSNTKKAGKTGPMKTLLVRVMTPDLRERLENLRKKPENIPQPISNTSRANLNKLLTDYTEMKKAILHVYWEEFQKDPVGLMSRVAQPAPKNIDQRKLIPVKDGNERLTSSGFACSQCCQPLYVYKLEQVNDKGKPHTNYFGRCNVSEHERLILLSPHKPEANDELVTYSLGKFGQRALDFYSIHVTRESNHPVKPLEQIGGNSCASGPVGKALSDACMGAVASFLTKYQDIILEHQKVIKKNEKRLANLKDIASANGLAFPKITLPPQPHTKEGIEAYNNVVAQIVIWVNLNLWQKLKIGRDEAKPLQRLKGFPSFPLVERQANEVDWWDMVCNVKKLINEKKEDGKVFWQNLAGYKRQEALLPYLSSEEDRKKGKKFARYQFGDLLLHLEKKHGEDWGKVYDEAWERIDKKVEGLSKHIKLEEERRSEDAQSKAALTDWLRAKASFVIEGLKEADKDEFCRCELKLQKWYGDLRGKPFAIEAENSILDISGFSKQYNCAFIWQKDGVKKLNLYLIINYFKGGKLRFKKIKPEAFEANRFYTVINKKSGEIVPMEVNFNFDDPNLIILPLAFGKIQGREFIWNDLLSLETGSLKLANGRVIEKTLYNRRTRQDEPALFVALTFERREVLDSSNIKPMNLIGIDRGENIPAVIALTDPEGCPLSRFKDSLGNPTHILRIGESYKEKQRTIQAAKEVEQRRAGGYSRKYASKAKNLADDMVRNTARDLLYYAVTQDAMLIFENLSRGFGRQGKRTFMAERQYTRMEDWLTAKLAYEGLPSKTYLSKTLAQYTSKTCSNCGFTITSADYDRVLEKLKKTATGWMTTINGKELKVEGQITYYNRYKRQNVVKDLSVELDRLSEESVNNDISSWTKGRSGEALSLLKKRFSHRPVQEKFVCLNCGFETHADEQAALNIARSWLFLRSQEYKKYQTNKTTGNTDKRAFVETWQSFYRKKLKEVWKPAV

SEQ ID NO: 4041 - protein, 979 aa, Artificial Sequence
  CasX Protein Variant
MQEIKRINKIRRRLVKDSNTKKAGKTGPMKTLLVRVMTPDLRERLENLRKKPENIPQPISNTSRANLNKLLTDYTEMKKAILHVYWEEFQKDPVGLMSRVAQPAPKNIDQRKLIPVKDGNERLTSSGFACSQCCQPLYVYKLEQVNDKGKPHTNYFGRCNVSEHERLILLSPHKPEANDELVTYSLGKFGQRALDFYSIHVTRESNHPVKPLEQIGGNSCASGPVGKALSDACMGAVASFLTKYQDIILEHQKVIKKNEKRLANLKDIASANGLAFPKITLPPQPHTKEGIEAYNNVVAQIVIWVNLNLWQKLKIGRDEAKPLQRLKGFPSFPLVERQANEVDWWDMVCNVKKLINEKKEDGKVFWQNLAGYKRQEALLPYLSSEEDRKKGKKFARYQFGDLLLHLEKKHGEDWGKVYDEAWERIDKKVEGLSKHIKLEEERRSEDAQSKAALTDWLRAKASFVIEGLKEADKDEFCRCELKLQKWYGDLRGKPFAIEAENSILDISGFSKQYNCAFIWQKDGVKKLNLYLIINYFKGGKLRFKKIKPEAFEANRFYTVINKKSGEIVPMEVNFNFDDPNLIILPLAFGKRQGREFIWNDLLSLETGSLKLANGRVIEKTLYNRRTRQDEPALFVALTFERREVLDSSNIKPMNLIGIDRGENIPAVIALTDPEGCPLSRFKDSLGNPTHILRIGTESYKEKQRTIQAAKEVEQRRAGGYSRKYASKAKNLADDMVRNTARDLLYYAVTQDAMLIFENLSRGFGRQGKRTFMAERQYTRMEDWLTAKLAYEGLPSKTYLSKTLAQYTSKTCSNCGFTITSADYDRVLEKLKKTATGWMTTINGKELKVEGQITYYNRYKRQNVVKDLSVELDRLSEESVNNDISSWTKGRSGEALSLLKKRFSHRPVQEKFVCLNCGFETHADEQAALNIARSWLFLRSQEYKKYQTNKTTGNTDKRAFVETWQSFYRKKLKEVWKPAV

SEQ ID NO: 4042 - protein, 978 aa, Artificial Sequence
  CasX Protein Variant
MQEIKRINKIRRRLVKDSNTKKAGKTGPMKTLLVRVMTPDLRERLENLRKKPENIPQPISNTSRANLNKLLTDYTEMKKAILHVYWEEFQKDPVGLMSRVAQPAPKNIDQRKLIPVKDGNERLTSSGFACSQCCQPLYVYKLEQVNDKGKPHTNYFGRCNVSEHERLILLSPHKPEANDELVTYSLGKFGQRALDFYSIHVTRESNHPVKPLEQIGGNSCASGPVGKALSDACMGAVASFLTKYQDIILEHQKVIKKNEKRLANLKDIASANGLAFPKITLPPQPHTKEGIEAYNNVVAQIVIWVNLNLWQKLKIGRDEAKPLQRLKGFPSFPLVERQANEVDWWDMVCNVKKLINEKKEDGKVFWQNLAGYKRQEALLPYLSSEEDRKKGKKFARYQFGDLLLHLEKKHGEDWGKVYDEAWERIDKKVEGLSKHIKLEEERRSEDAQSKAALTDWLRAKASFVIEGLKEADKDEFCRCELKLQKWYGDLRGKPFAIEAENSILDIGRFSKQYNCAFIWQKDGVKKLNLYLIINYFKGGKLRFKKIKPEAFEANRFYTVINKKSGEIVPMEVNFNFDDPNLIILPLAFGKRQGREFIWNDLLSLETGSLKLANGRVIEKTLYNRRTRQDEPALFVALTFERREVLDSSNIKPMNLIGIDRGENIPAVIALTDPEGCPLSRFKDSLGNPTHILRIGESYKEKQRTIQAAKEVEQRRAGGYSRKYASKAKNLADDMVRNTARDLLYYAVTQDAMLIFENLSRGFGRQGKRTFMAERQYTRMEDWLTAKLAYEGLPSKTYLSKTLAQYTSKTCSNCGFTITSADYDRVLEKLKKTATGWMTTINGKELKVEGQITYYNRYKRQNVVKDLSVELDRLSEESVNNDISSWTKGRSGEALSLLKKRFSHRPVQEKFVCLNCGFETHADEQAALNIARSWLFLRSQEYKKYQTNKTTGNTDKRAFVETWQSFYRKKLKEVWKPAV

SEQ ID NO: 4043 - protein, 978 aa, Artificial Sequence
  CasX Protein Variant
MQEIKRINKIRRRLVKDSNTKKAGKTGPMKTLLVRVMTPDLRERLENLRKKPENIPQPISNTSRANLNKLLTDYTEMKKAILHVYWEEFQKDPVGLMSRVAQPAPKNIDQRKLIPVKDGNERLTSSGFACSQCCQPLYVYKLEQVNDKGKPHTNYFGRCNVSEHERLILLSPHKPEANDELVTYSLGKFGQRALDFYSIHVTRESNHPVKPLEQIGGNSCASGPVGKALSDACMGAVASFLTKYQDIILEHQKVIKKNEKRLANLKDIASANGLAFPKITLPPQPHTKEGIEAYNNVVAQIVIWVNLNLWQKLKIGRDEAKPLQRLKGFPSFPLVERQANEVDWWDMVCNVKKLINEKKEDGKVFWQNLAGYKRQEALLPYLSSEEDRKKGKKFARYQFGDLLLHLEKKHGEDWGKVYDEAWERIDKKVEGLSKHIKLEEERRSEDAQSKAALTDWLRAKASFVIEGLKEADKDEFCRCELKLQKWYGDLRGKPFAIEAENSILDISGFSKQYNCAFIWQKDGVKKLNLYLIINYFKGGKLRFKKIKPEAFEANRFYTVINKKSGEIVPMEVNFNFDDPNLIILPLAFGKRQGREFIWNDLLSLETGSLKLANGRVIEKTLYNRRTRQDEPALFVALTFERREVLDSSNIKPMNLIGIDRGENIPAVIALTDPEGCPLSRFKDSLGNPTHILRIGESYKEKQRTIQAAKEVEQRRAGGYSRKNASKAKNLADDMVRNTARDLLYYAVTQDAMLIFENLSRGFGRQGKRTFMAERQYTRMEDWLTAKLAYEGLPSKTYLSKTLAQYTSKTCSNCGFTITSADYDRVLEKLKKTATGWMTTINGKELKVEGQITYYNRYKRQNVVKDLSVELDRLSEESVNNDISSWTKGRSGEALSLLKKRFSHRPVQEKFVCLNCGFETHADEQAALNIARSWLFLRSQEYKKYQTNKTTGNTDKRAFVETWQSFYRKKLKEVWKPAV

SEQ ID NO: 4044 - protein, 979 aa, Artificial Sequence
  CasX Protein Variant
MQEIKRINKIRRRLVKDSNTKKAGKTGPMKTLLVRVMTPDLRERLENLRKKPENIPQPISNTSRANLNKLLTDYTEMKKAILHVYWEEFQKDPVGLMSRVAQPAPKNIDQRKLIPVKDGNERLTSSGFACSQCCQPLYVYKLEQVNDKGKPHTNYFGRCNVSEHERLILLSPHKPEANDELVTYSLGKFGQRALDFYSIHVTRESNHPVKPLEQIGGNSCASGPVGKALSDACMGAVASFLTKYQDIILEHQKVIKKNEKRLANLKDIASANGLAFPKITLPPQPHTKEGIEAYNNVVAQIVIWVNLNLWQKLKIGRDEAKPLQRLKGFPSFPLVERQANEVDWWDMVCNVKKLINEKKEDGKVFWQNLAGYKRQEALLPYLSSEEDRKKGKKFARYQFGDLLLHLEKKHGEDWGKVYDEAWERIDKKVEGLSKHIKLEEERRSEDAQSKAALTDWLRAKASFVIEGLKEADKDEFCRCELKLQKWYGDLRGKPFAIEAENSILDISGFSKQYNCAFIWQKDGVKKLNLYLIINYFKGGKLRFKKIKPEAFEANRFYTVINKKSGEIVPMEVNFNFDDPNLIILPLAFGKRQGREFIWNDLLSLETGSLKLANGRVIEKTLYNRRTRQDEPALFVALTFERREVLDSSNIKPMNLIGIDRGENIPAVIALTDPEGCPLSRFKDSLGNPTHILRIGPESYKEKQRTIQAAKEVEQRRAGGYSRKYASKAKNLADDMVRNTARDLLYYAVTQDAMLIFENLSRGFGRQGKRTFMAERQYTRMEDWLTAKLAYEGLPSKTYLSKTLAQYTSKTCSNCGFTITSADYDRVLEKLKKTATGWMTTINGKELKVEGQITYYNRYKRQNVVKDLSVELDRLSEESVNNDISSWTKGRSGEALSLLKKRFSHRPVQEKFVCLNCGFETHADEQAALNIARSWLFLRSQEYKKYQTNKTTGNTDKRAFVETWQSFYRKKLKEVWKPAV

SEQ ID NO: 4045 - protein, 978 aa, Artificial Sequence
  CasX Protein Variant
MQEIKRINKIRRRLVKDSNTKKAGKTGPMKTLLVRVMTPDLRERLENLRKKPENIPQPISNTSRANLNKLLTDYTEMKKAILHVYWEEFQKDPVGLMSRVAQPAPKNIDQRKLIPVKDGNERLTSSGFACSQCCQPLYVYKLEQVNDKGKPHTNYFGRCNVSEHERLILLSPHKPEANDELVTYSLGKFGQRALDFYSIHVTRESNHPVKPLEQIGGNSCASGPVRKALSDACMGAVASFLTKYQDIILEHQKVIKKNEKRLANLKDIASANGLAFPKITLPPQPHTKEGIEAYNNVVAQIVIWVNLNLWQKLKIGRDEAKPLQRLKGFPSFPLVERQANEVDWWDMVCNVKKLINEKKEDGKVFWQNLAGYKRQEALLPYLSSEEDRKKGKKFARYQFGDLLLHLEKKHGEDWGKVYDEAWERIDKKVEGLSKHIKLEEERRSEDAQSKAALTDWLRAKASFVIEGLKEADKDEFCRCELKLQKWYGDLRGKPFAIEAENSILDISGFSKQYNCAFIWQKDGVKKLNLYLIINYFKGGKLRFKKIKPEAFEANRFYTVINKKSGEIVPMEVNFNFDDPNLIILPLAFGKRQGREFIWNDLLSLETGSLKLANGRVIEKTLYNRRTRQDEPALFVALTFERREVLDSSNIKPMNLIGIDRGENIPAVIALTDPEGCPLSRFKDSLGNPTHILRIGESYKEKQRTIQAAKEVEQRRAGGYSRKYASKAKNLADDMVRNTARDLLYYAVTQDAMLIFENLSRGFGRQGKRTFMAERQYTRMEDWLTAKLAYEGLPSKTYLSKTLAQYTSKTCSNCGFTITSADYDRVLEKLKKTATGWMTTINGKELKVEGQITYYNRYKRQNVVKDLSVELDRLSEESVNNDISSWTKGRSGEALSLLKKRFSHRPVQEKFVCLNCGFETHADEQAALNIARSWLFLRSQEYKKYQTNKTTGNTDKRAFVETWQSFYRKKLKEVWKPAV

SEQ ID NO: 4046 - protein, 978 aa, Artificial Sequence
  CasX Protein Variant
MQEIKRINKIRRRLVKDSNTKKAGKTGPMKTLLVRVMTPDLRERLENLRKKPENIPQPISNTSRANLNKLLTDYTEMKKAILHVYWEEFQKDPVGLMSRVAQPAPKNIDQRKLIPVKDGNERLTSSGFACSQCCQPLYVYKLEQVNDKGKPHTNYFGRCNVSEHERLILLSPHKPEANDELVTYSLGKFGQRALDFYSIHVTRESNHPVKPLEQIGGNSCASGPVGKALSDACMGAVASFLTKYQDIILEHQKVIKKNEKRLANLKDIASANGLAFPKITLPPQPHTKEGIEAYNNVVAQIVIWVNLNLWQKLKIGRDEAKPLQRLKGFPSFPLVERQANEVDWWDMVCNVKKLINEKKEDGKVFWQNLAGYKRQEALLPYLSSEEDRKKGKKFARYQFGDLLLHLEKKHGEDWGKVYDEAWERIDKKVEGLSKHIKLEEERRSEDAQSKAALTDWLRAKASFVIEGLKEADKDEFCRCELKLQKWYGDLRGKPFAIEAENSILDISGFSKQYNCAFIWQKDGVKKLNLYLIINYFKGGKLRFKKIKPEAFEANRFYTVINKKSGEIVPMEVNFNFDDPNLIILPLAFGKRQGREFIWNDLLSLETGSLKLANGRVIEKTLYNRRTRQDEPALFVALTFERREVLDSSNIKPMNLIGIDRGENIPAVIALTDPEGCPLSRFKDSLGNPTHILRIGESYKEKQRTIQAAKEVEQRRAGGYSRKYASKAKNLADDMVRNTARDLLYYAVTQDAMLIFENLSRGFGRQGKRTFMAERQYTRMEDWLTAKLAYEGLPSKTYLSKTLAQYTSKTCSNCGFTITSADYDRVLEKLKKTATGWMTTINGKELKVEGQITYYNRYKRQNVVKDLSVELDRLSEESVNNDISSWTKGRSGEALSLLKKRFSHRPVQEKFVCLNCGFETHADEQAALNIARSWLFLRSQEYKKYQTNKTTGNTDKRAFVETWQSFYRKKLKEVGKPAV

SEQ ID NO: 4047 - protein, 979 aa, Artificial Sequence
  CasX Protein Variant
MQEIKRINKIRRRLVKDSNTKKAGKTGPMKTLLVRVMTPDLRERLENLRKKPENIPQPISNTSRANLNKLLTDYTEMKKAILHVYWEEFQKDPVGLMSRVAQPAPKNIDQRKLIPVKDGNERLTSSGFACSQCCQPLYVYKLEQVNDKGKPHTNYFGRCNVSEHERLILLSPHKPEANDELVTYSLGKFGQRALDFYSIHVTRESNHPVKPLEQIGGNSCASGPVGKALSDACMGAVASFLTKYQDIILEHQKVIKKNEKRLANLKDIASANGLAFPKITLPPQPHTKEGIEAYNNVVAQIVIWVNLNLWQKLKIGRDEAKPLQRLKGFPSFPLVERQANEVDWWDMVCNVKKLINEKKEDGKVFWQNLAGYKRQEALLPYLSSEEDRKKGKKFARYQFGDLLLHLEKKHGEDWGKVYDEAWERIDKKVEGLSKHIKLEEERRSEDAQSKAALTDWLRAKASFVIEGLKEADKDEFCRCELKLQKWYGDLRGKPFAIEAENSILDISGFSKQYNCAFIWQKDGVKKLNLYLIINYFKGGKLRFKKIKPEAFEANRFYTVINKKSGEIVPMEVNFNFDDPNLIILPLAFGKRQGREFIWNDLLSLETGSLKLANGRVIEKTLYNRRTRQDEPALFVALTFERREVLDSSNIKPMNLIGIDRGENIPAVIALTDPEGCPLSRFKDSLGNPTHILRIGESYKEKQRTIQAAKEVEQRRAGGYSRKYASKAKNLADDMVRNTARDLLYYAVTQDAMLIFENLSRGFGRQGKRTFMAMERQYTRMEDWLTAKLAYEGLPSKTYLSKTLAQYTSKTCSNCGFTITSADYDRVLEKLKKTATGWMTTINGKELKVEGQITYYNRYKRQNVVKDLSVELDRLSEESVNNDISSWTKGRSGEALSLLKKRFSHRPVQEKFVCLNCGFETHADEQAALNIARSWLFLRSQEYKKYQTNKTTGNTDKRAFVETWQSFYRKKLKEVWKPAV

SEQ ID NO: 4048 - protein, 978 aa, Artificial Sequence
  CasX Protein Variant
MQEIKRINKIRRRLVKDSNTKKAGKTGPMKTLLVRVMTPDLRERLENLRKKPENIPQPISNTSRANLNKLLTDYTEMKKAILHVYWEEFQKDPVGLMSRVAQPAPKNIDQRKLIPVKDGNERLTSSGFACSQCCQPLYVYKLEQVNDKGKPHTNYFGRCNVSEHERLILLSPHKPEANDELVTYSLGKFGQRALDFYSIHVTRESNHPVKPLEQIGGNSCASGPVGKALSDACMGAVASFLTKYQDIILEHQKVIKKNEKRLANLKDIASANGLAFPKITLPPQPHTKEGIEAYNNVVAQIVIWVNLNLWQKLKIGRDEAKPLQRLKGFPSFPLVERQANEVDWWDMVCNVKKLINEKKEDGKVFWQNLAGYKRQEALLPYLSSEEDRKKGKKFARYQFGDLLLHLEKKHGEDWGKVYDEAWERIDKKVEGLSKRIKLEEERRSEDAQSKAALTDWLRAKASFVIEGLKEADKDEFCRCELKLQKWYGDLRGKPFAIEAENSILDISGFSKQYNCAFIWQKDGVKKLNLYLIINYFKGGKLRFKKIKPEAFEANRFYTVINKKSGEIVPMEVNFNFDDPNLIILPLAFGKRQGREFIWNDLLSLETGSLKLANGRVIEKTLYNRRTRQDEPALFVALTFERREVLDSSNIKPMNLIGIDRGENIPAVIALTDPEGCPLSRFKDSLGNPTHILRIGESYKEKQRTIQAAKEVEQRRAGGYSRKYASKAKNLADDMVRNTARDLLYYAVTQDAMLIFENLSRGFGRQGKRTFMAERQYTRMEDWLTAKLAYEGLPSKTYLSKTLAQYTSKTCSNCGFTITSADYDRVLEKLKKTATGWMTTINGKELKVEGQITYYNRYKRQNVVKDLSVELDRLSEESVNNDISSWTKGRSGEALSLLKKRFSHRPVQEKFVCLNCGFETHADEQAALNIARSWLFLRSQEYKKYQTNKTTGNTDKRAFVETWQSFYRKKLKEVWKPAV

SEQ ID NO: 4049 - protein, 978 aa, Artificial Sequence
  CasX Protein Variant
MQEIKRINKIRRRLVKDSNTKKAGKTGPMKTLLVRVMTPDLRERLENLRKKPENIPQPISNTSRANLNKLLTDYTEMKKAILHVYWEEFQKDPVGLMSRVAQPAPKNIDQRKLIPVKDGNERLTSSGFACSQCCQPLYVYKLEQVNDKGKPHTNYFGRCNVSEHERLILLSPHKPEANDELVTYSLGKFGQRALDFYSIHVTRESNHPVKPLEQIGGNSCASGPVGKALSDACMGAVASFLTKYQDIILEHQKVIKKNEKRLANLKDIASANGLAFPKITLPPQPHTKEGIEAYNNVVAQIVIWVNLNLWQKLKIGRDEAKPLQRLKGFPSFPLVERQANEVDWWDMVCNVKKLINEKKEDGKVFWQNLAGYKRQEALLPYLSSEEDRKKGKKFARYQFGDLLLHLEKKHGEDWGKVYDEAWERIDKKVEGLSKHIKLEEERRSEDAQSKAALTDWLRAKASFVIEGLKEADKDEFCRCELKLQKWYGDLRGKPFAIEAENSILDISGFSKQYNCAFIWQKDGVKKLNLYLIINYFKGGKLRFKKIKPEAFEANRFYTVINKKSGEIVPMEVNFNFDDPNLIILPLAFGKRQGREFIWNDLLSLETGSLKLANGRVIEKTLYNRRTRQDEPALFVALTFERREVLDSSNIKPMNLIGIDRGENIPAVIALTDPEGCPLSRFKDSLGNPTHILRIGESYKEKQRTIQAAKEVEQRRAGGYSRKYSSKAKNLADDMVRNTARDLLYYAVTQDAMLIFENLSRGFGRQGKRTFMAERQYTRMEDWLTAKLAYEGLPSKTYLSKTLAQYTSKTCSNCGFTITSADYDRVLEKLKKTATGWMTTINGKELKVEGQITYYNRYKRQNVVKDLSVELDRLSEESVNNDISSWTKGRSGEALSLLKKRFSHRPVQEKFVCLNCGFETHADEQAALNIARSWLFLRSQEYKKYQTNKTTGNTDKRAFVETWQSFYRKKLKEVWKPAV

SEQ ID NO: 4050 - protein, 978 aa, Artificial Sequence
  CasX Protein Variant
MQEIKRINKIRRRLVKDSNTKKAGKTGPMKTLLVRVMTPDLRERLENLRKKPENIPQPISNTSRANLNKLLTDYTEMKKAILHVYWEEFQKDPVGLMSRVAQPAPKNIDQRKLIPVKDGNERLTSSGFACSQCCQPLYVYKLEQVNDKGKPHTNYFGRCNVSEHERLILLSPHKPEANDELVTYSLGKFGQRALDFYSIHVTRESNHPVKPLEQIGGNSCASGPVGKALSDACMGAVASFLTKYQDIILEHQKVIKKNEKRLANLKDIASANGLAFPKITLPPQPHTKEGIEAYNNVVAQIVIWVNLNLWQKLKIGRDEAKPLQRLKGFPSFPLVERQANEVDWWDMVCNVKKLINEKKEDGKVFWQNLAGYKRQEALLPYLSSEEDRKKGKKFARYQFGDLLLHLEKKHGEDWGKVYDEAWERIDKKVEGLSKHIKLEEERRSEDAQSKAALTDWLRAKASFVIEGLKEADKDEFCRCELKLQKWYGDLRGKPFAIEAENSILDISGFSKQYNCAFIWQKDGVKKLNLYLIINYFKGGKLRFKKIKPEAFEANRFYTVINKKSGEIVPMEVNFNFDDPNLIILPLAFGKRQGREFIWNDLLSLETGSLKLANGRVIEKTLYNRRTRQDEPALFVALTFERREVLDSSNIKPMNLIGIDRGENIPAVIALTDPEGCPLSRFKDSLGNPTHILRIGESYKEKQRKIQAAKEVEQRRAGGYSRKYASKAKNLADDMVRNTARDLLYYAVTQDAMLIFENLSRGFGRQGKRTFMAERQYTRMEDWLTAKLAYEGLPSKTYLSKTLAQYTSKTCSNCGFTITSADYDRVLEKLKKTATGWMTTINGKELKVEGQITYYNRYKRQNVVKDLSVELDRLSEESVNNDISSWTKGRSGEALSLLKKRFSHRPVQEKFVCLNCGFETHADEQAALNIARSWLFLRSQEYKKYQTNKTTGNTDKRAFVETWQSFYRKKLKEVWKPAV

SEQ ID NO: 4051 - protein, 978 aa, Artificial Sequence
  CasX Protein Variant
MQEIKRINKIRRRLVKDSNTKKAGKTGPMKTLLVRVMTPDLRERLENLRKKPENIPQPISNTSRANLNKLLTDYTEMKKAILHVYWEEFQKDPVGLMSRVAQPAPKNIDQRKLIPVKDGNERLTSSGFACSQCCQPLYVYKLEQVNDKGKPHTNYFGRCNVSEHERLILLSPHKPEANDELVTYSLGKFGQRALDFYSIHVTRESNHPVKPLEQIGGNSCASGPVGKALSDACMGAVASFLTKYQDIILEHQKVIKKNEKRLANLKDIASANGLAFPKITLPPQPHTKEGIEAYNNVVAQIVIWVNLNLWQKLKIGRDEAKPLQRLKGFPSFPLVERQANEVDWWDMVCNVKKLINEKKEDGKVFWQNLAGYKRQEALLPYLSSEEDRKKGKKFARYQFGDLLLHLEKKHGEDWGKVYDEAWERIDKKVEGLSKHIKLEEERRSEDAQSKAALTDWLRAKASFVIEGLKEADKDEFCRCELKLQKWYGDLRGKPFAIEAENSILDISGFSKQYNCAFIWQKDGVKKLNLYLIINYFKGGKLRFKKIKPEAFEANRFYTVINKKSGEIVPMEVNFNFDDPNLIILPLAFGKRQGREFIWNDLLSLETGSLKLANGRVIEKTLYNRRTRQDEPALFVALTFERREVLDSSNIKPMNLIGIDRGENIPAVIALTDPEGCPLSRFKDSLGNPTHILRIGESYKEKQRTIQAAKEVEQRRAGGYSRKYASKAKNLADDMVRNTARDLLYYAVTQDAMLIFENLSRGFGRQGKRTFMAERQYTRMEDWLTAKLAYEGLPSKTYLSKTLAQYTSKTCSNCGFTITSADYDRVLEKLKKTATGWMTTINGKELKVEGQITYYNRYKRQNVVKDLSVELDRLSEESVNNDISSWTKGRSGEALSLLKKRFSHRPVQEKFVCLNCGFETHADEQAALNIARSWLFLRSQEYKKYQTNKTTGNTDKRAFVETWQSFNRKKLKEVWKPAV

SEQ ID NO: 4052 - protein, 978 aa, Artificial Sequence
  CasX Protein Variant
MQEIKRINKIRRRLVKDSNTKKAGKTGPMKTLLVRVMTPDLRERLENLRKKPENIPQPISNTSRANLNKLLTDYTEMKKAILHVYWEEFQKDPVGLMSRVAQPAPKNIDQRKLIPVKDGNERLTSSGFACSQCCQPLYVYKLEQVNDKGKPHTNYFGRCNVSERERLILLSPHKPEANDELVTYSLGKFGQRALDFYSIHVTRESNHPVKPLEQIGGNSCASGPVGKALSDACMGAVASFLTKYQDIILEHQKVIKKNEKRLANLKDIASANGLAFPKITLPPQPHTKEGIEAYNNVVAQIVIWVNLNLWQKLKIGRDEAKPLQRLKGFPSFPLVERQANEVDWWDMVCNVKKLINEKKEDGKVFWQNLAGYKRQEALLPYLSSEEDRKKGKKFARYQFGDLLLHLEKKHGEDWGKVYDEAWERIDKKVEGLSKHIKLEEERRSEDAQSKAALTDWLRAKASFVIEGLKEADKDEFCRCELKLQKWYGDLRGKPFAIEAENSILDISGFSKQYNCAFIWQKDGVKKLNLYLIINYFKGGKLRFKKIKPEAFEANRFYTVINKKSGEIVPMEVNFNFDDPNLIILPLAFGKRQGREFIWNDLLSLETGSLKLANGRVIEKTLYNRRTRQDEPALFVALTFERREVLDSSNIKPMNLIGIDRGENIPAVIALTDPEGCPLSRFKDSLGNPTHILRIGESYKEKQRTIQAAKEVEQRRAGGYSRKYASKAKNLADDMVRNTARDLLYYAVTQDAMLIFENLSRGFGRQGKRTFMAERQYTRMEDWLTAKLAYEGLPSKTYLSKTLAQYTSKTCSNCGFTITSADYDRVLEKLKKTATGWMTTINGKELKVEGQITYYNRYKRQNVVKDLSVELDRLSEESVNNDISSWTKGRSGEALSLLKKRFSHRPVQEKFVCLNCGFETHADEQAALNIARSWLFLRSQEYKKYQTNKTTGNTDKRAFVETWQSFYRKKLKEVWKPAV

SEQ ID NO: 4053 - protein, 978 aa, Artificial Sequence
  CasX Protein Variant
MQEIKRINKIRRRLVKDSNTKKAGKTGPMKTLLVRVMTPDLRERLENLRKKPENIPQPISNTSRANLNKLLTDYTEMKKAILHVYWEEFQKDPVGLMSRVAQPAPKNIDQRKLIPVKDGNERLTSSGFACSQCCQPLYVYKLEQVNDKGKPHTNYFGRCNVSEHERLILLSPHKPEANDELVTYSLGKFGQRALDFYSIHVTRESNHPVKPLEQIGGNSCASGPVGKALSDACMGAVASFLTKYQDIILEHQKVIKKNEKRLANLKDIASANGLAFPKITLPPQPHTKEGIEAYNNVVAQIVIWVNLNLWQKLKIGRDEAKPLQRLKGFPSFPLVERQANEVDWWDMVCNVKKLINEKKEDGKVFWQNLAGYKRQEALLPYLSSEEDRKKGKKFARYQFGDLLLHLEKKHGEDWGKVYDEAWERIDKKVEGLSKHIKLEEERRSEDAQSKAALTDWLRAKASFVIEGLKEADKDEFCRCELKLQKWYGDLRGKPFAIEAENSILDISGFSKQYNCAFIWQKDGVKKLNLYLIINYFKGGKLRFKKIKPEAFEANRIYTVINKKSGEIVPMEVNFNFDDPNLIILPLAFGKRQGREFIWNDLLSLETGSLKLANGRVIEKTLYNRRTRQDEPALFVALTFERREVLASSNIKPMNLIGIDRGENIPAVIALTDPEGCPLSRFKDSLGNPTHILRIDESYKEKQRTIQAAKEVEQRRAGGYSRKYASKAKNLADDMVRNTARDLLYYAVTQDSMLIFENLSRGFGRQGKRTFMAERQYTRMEDWLTAKLAYEGLPSKTYLSKTLAQYTSKTCSNCGFTITSPDYDRVLEKLKKTATGWMTTINGKELKVEGQITYYNRYKRQNVVKDLSVELDRLSEESVNNDISSWTKGRSGEALSLLKKRFSHRPVQEKFVCLNCGFETHADEQAALNIARSWLFLRSQEYKKYQTNKTTGNTDKRAFVETWQSFYRKKLKEVWKPAV

SEQ ID NO: 4054 - protein, 978 aa, Artificial Sequence
  CasX Protein Variant
MQEIKRINKIRRRLVKDSNTKKAGKTGPMKTLLVRVMTPDLRERLENLRKKPENIPQPISNTSRANLNKLLTDYTEMKKAILHVYWEEFQKDPVGLMSRVAQPAPKNIDQRKLIPVKDGNERLTSSGFACSQCCQPLYVYKLEQVNDKGKPHTNYFGRCNVSEHERLILLSPHKPEANDELVTYSLGKFGQRALDFYSIHVTRESNHPVKPLEQIGGNSCASGPVGKALSDACMGAVASFLTKYQDIILEHQKVIKKNEKRLANLKDIASANGLAFPKITLPPQPHTKEGIEAYNNVVAQIVIWVNLNLWQKLKIGRDEAKPLQRLKGFPSFPLVERQANEVDWWDMVCNVKKLINEKKEDGKVFWQNLAGYKRQEALLPYLSSEEDRKKGKKFARYQFGDLLLHLEKKHGEDWGKVYDEAWERIDKKVEGLSKHIKLEEERRSEDAQSKAALTDWLRAKASFVIEGLKEADKDEFCRCELKLQKWYGDLRGKPFAIEAENSILDISGFSKQYNCAFIWQKDGVKKLNLYLIINYFKGGKLRFKKIKPEAFEANRFYTVINKKSGEIVPMEVNFNFDDPNLIILPLAFGKRQGREFIWNDLLSLETGSLKLANGRVIEKTLYNRRTRQDEPALFVALTFERREVLDSSNIKPMNLIGIHRGENIPAVIALTDPEGCPLSRFKDSLGNPTHILRIGESYKEKQRTIQAAKEVEQRRAGGYSRKYASKAKNLADDMVRNTARDLLYYAVTQDAMLIFENLSRGFGRQGKRTFMAERQYTRMEDWLTAKLAYEGLPSKTYLSKTLAQYTSKTCSNCGFTITSADYDRVLEKLKKTATGWMTTINGKELKVEGQITYYNRYKRQNVVKDLSVELDRLSEESVNNDISSWTKGRSGEALSLLKKRFSHRPVQEKFVCLNCGFETHADEQAALNIARSWLFLRSQEYKKYQTNKTTGNTDKRAFVETWQSFYRKKLKEVWKPAV

SEQ ID NO: 4055 - protein, 978 aa, Artificial Sequence
  CasX Protein Variant
MQEIKRINKIRRRLVKDSNTKKAGKTGPMKTLLVRVMTPDLRERLENLRKKPENIPQPISNTSRANLNKLLTDYTEMKKAILHVYWEEFQKDPVGLMSRVAQPAPKNIDQRKLIPVKDGNERLTSSGFACSQCCQPLYVYKLEQVNDKGKPHTNYFGRCNVSEHERLILLSPHKPEANDELVTYSLGKFGQRALDFYSIHVTRESNHPVKPLEQIGGNSCASGPVGKALSDACMGAVASFLTKYQDIILEHQKVIKKNEKRLANLKDIASANGLAFPKITLPPQPHTKEGIEAYNNVVAQIVIWVNLNLWQKLKIGRDEAKPLQRLKGFPSFPLVERQANEVDWWDMVCNVKKLINEKKEDGKVFWQNLAGYKRQEALLPYLSSEEDRKKGKKFARYQFGDLLLHLEKKHGEDWGKVYDEAWERIDKKVEGLSKHIKLEEERRSEDAQSKAALTDWLRAKASFVIEGLKEADKDEFCRCELKLQKWYGDLRGKPFAIEAENSILDISGFSKQYNCAFIWQKDGVKKLNLYLIINYFKGGKLRFKKIKPEAFEANRFYTVINKKSGEIVPMEVNFNFDDPNLIILPLAFGKRQGREFIWNDLLSLETGSLKLANGRVIEKTLYNRRTRQDEPALFVALTFERREVLDSSNIKPMNLIGIDRGENIPAVIALTDPEGCPLSRFKDSLGNPTHILRIGESYKEKQRTIQAAKEVEQRRAGGYSRKYASKAKNLADDMVRNTARDLLYYAVTQDAMLIFENLSRGFGRQGKRTFMAERQYTRMEDWLTAKLAYEGLPSKTYLSKTLAQYVSKTCSNCGFTITSADYDRVLEKLKKTATGWMTTINGKELKVEGQITYYNRYKRQNVVKDLSVELDRLSEESVNNDISSWTKGRSGEALSLLKKRFSHRPVQEKFVCLNCGFETHADEQAALNIARSWLFLRSQEYKKYQTNKTTGNTDKRAFVETWQSFYRKKLKEVWKPAV

SEQ ID NO: 4056 - protein, 978 aa, Artificial Sequence
  CasX Protein Variant
MQEIKRINKIRRRLVKDSNTKKAGKTGPMKTLLVRVMTPDLRERLENLRKKPENIPQPISNTSRANLNKLLTDYTEMKKAILHVYWEEFQKDPVGLMSRVAQPAPKNIDQRKLIPVKDGNERLTSSGFACSQCCQPLYVYKLEQVNDKGKPHTNYFGRCNVSEHERLILLSPHKPEANDELVTYSLGKFGQRALDFYSIHVTRESNHPVKPLEQIGGNSCASGPVGKALSDACMGAVASFLTKYQDIILEHQKVIKKNEKRLANLKDIASANGLAFPKITLPPQPHTKEGIEAYNNVVAQIVIWVNLNLWQKLKIGRDEAKPLQRLKGFPSFPLVERQANEVDWWDMVCNVKKLINEKKEDGKVFWQNLAGYKRQEALLPYLSSEEDRKKGKKFARYQFGDLLLHLEKKHGEDWGKVYDEAWERIDKKVEGLSKHIKLEEERRSEDAQSKAALTDWLRAKASFVIEGLKEADKDEFCRCELKLQKWYGDLRGKPFAIEAENSILDISGFSKQYNCAFIWQKDGVKKLNLYLIINYFKGGKLRFKKIKPEAFEANRFYTVINKKSGEIVPMEVNFNFDDPNLIILPLAFGKRQGREFIWNDLLSLETGSLKLANGRVIEKTLYNRRTRQDEPALFVALTFERREVLDSSNIKPMNLIGIDRGENIPAVIALTDPEGCPLSRFKDSLGNPTHILRIGESYKEKQRTIQAAKEVEQRRAGGYSRKYASKAKNLADDMVRNTARDLLYYAVTQDAMLIFENLSRGFGRQGKRTFMAERQYTRMEDWLTAKLADEGLPSKTYLSKTLAQYTSKTCSNCGFTITSADYDRVLEKLKKTATGWMTTINGKELKVEGQITYYNRYKRQNVVKDLSVELDRLSEESVNNDISSWTKGRSGEALSLLKKRFSHRPVQEKFVCLNCGFETHADEQAALNIARSWLFLRSQEYKKYQTNKTTGNTDKRAFVETWQSFYRKKLKEVWKPAV

SEQ ID NO: 4057 - protein, 978 aa, Artificial Sequence; identical to SEQ ID NO: 3991
  CasX Protein Variant

SEQ ID NO: 4058 - protein, 978 aa, Artificial Sequence
  CasX Protein Variant
MQEIKRINKIRRRLVKDSNTKKAGKTGPMKTLLVRVMTPDLRERLENLRKKPENIPQPISNTSRANLNKLLTDYTEMKKAILHVYWEEFQKDPVGLMSRVAQPAPKNIDQRKLIPVKDGNERLTSSGFACSQCCQPLYVYKLEQVNDKGKPHTNYFGRCNVSEHERLILLSPHKPEANDELVTYSLGKFGQRALDFYSIHVTRESNHPVKPPEQIGGNSCASGPVGKALSDACMGAVASFLTKYQDIILEHQKVIKKNEKRLANLKDIASANGLAFPKITLPPQPHTKEGIEAYNNVVAQIVIWVNLNLWQKLKIGRDEAKPLQRLKGFPSFPLVERQANEVDWWDMVCNVKKLINEKKEDGKVFWQNLAGYKRQEALLPYLSSEEDRKKGKKFARYQFGDLLLHLEKKHGEDWGKVYDEAWERIDKKVEGLSKHIKLEEERRSEDAQSKAALTDWLRAKASFVIEGLKEADKDEFCRCELKLQKWYGDLRGKPFAIEAENSILDISGFSKQYNCAFIWQKDGVKKLNLYLIINYFKGGKLRFKKIKPEAFEANRFYTVINKKSGEIVPMEVNFNFDDPNLIILPLAFGKRQGREFIWNDLLSLETGSLKLANGRVIEKTLYNRRTRQDEPALFVALTFERREVLDSSNIKPMNLIGIDRGENIPAVIALTDPEGCPLSRFKDSLGNPTHILRIGESYKEKQRTIQAAKEVEQRRAGGYSRKYASKAKNLADDMVRNTARDLLYYAVTQDAMLIFENLSRGFGRQGKRTFMAERQYTRMEDWLTAKLAYEGLPSKTYLSKTLAQYTSKTCSNCGFTITSADYDRVLEKLKKTATGWMTTINGKELKVEGQITYYNRYKRQNVVKDLSVELDRLSEESVNNDISSWTKGRSGEALSLLKKRFSHRPVQEKFVCLNCGFETHADEQAALNIARSWLFLRSQEYKKYQTNKTTGNTDKRAFVETWQSFYRKKLKEVWKPAV

SEQ ID NO: 4059 - DNA, 60 bp, Artificial Sequence
  beta-2 microglobulin (B2M) 7.37 non-target strand
tgaagctgacagcattcgggccgagatgtctcgctccgtggccttagctgtgctcgcgct

SEQ ID NO: 4060 - DNA, 60 bp, Artificial Sequence; identical to SEQ ID NO: 4059
  beta-2 microglobulin (B2M) 7.37 target strand

SEQ ID NO: 4061 - DNA, 20 bp, Artificial Sequence
  spacer sequence
gaggaggacggcctggccga

SEQ ID NO: 4062 - DNA, 20 bp, Artificial Sequence
  spacer sequence
accgctgcgccaaggtgcgg

SEQ ID NO: 4063 - DNA, 20 bp, Artificial Sequence
  spacer sequence
gccaggccgtcctcctcgga

SEQ ID NO: 4064 - DNA, 20 bp, Artificial Sequence
  spacer sequence
gtgctcgggtgcttcggcca

SEQ ID NO: 4065 - DNA, 20 bp, Artificial Sequence
  spacer sequence
atggccttcttcctggcttc

SEQ ID NO: 4066 - DNA, 20 bp, Artificial Sequence
  spacer sequence
gcaccaccacgtaggtgcca

SEQ ID NO: 4067 - DNA, 20 bp, Artificial Sequence
  spacer sequence
tcctggcttcctggtgaaga

SEQ ID NO: 4068 - DNA, 20 bp, Artificial Sequence
  spacer sequence
tggcttcctggtgaagatga

SEQ ID NO: 4069 - DNA, 20 bp, Artificial Sequence
  spacer sequence
ccaggaagccaggaagaagg

SEQ ID NO: 4070 - DNA, 20 bp, Artificial Sequence
  spacer sequence
tccttgcatggggccaggat

SEQ ID NO: 4071 - DNA, 20 bp, Artificial Sequence
  spacer sequence
ggcggcaagttctgctcagc

SEQ ID NO: 4072 - DNA, 20 bp, Artificial Sequence
  spacer sequence
tctccacgatcgtcagcgtg

SEQ ID NO: 4073 - DNA, 20 bp, Artificial Sequence
  spacer sequence
acgatcgtcagcgtgagtgc

SEQ ID NO: 4074 - DNA, 20 bp, Artificial Sequence
  spacer sequence
ctctagcaatggatcgtggg

SEQ ID NO: 4075 - DNA, 20 bp, Artificial Sequence
  spacer sequence
caaacaaatgtgtcacaaag

SEQ ID NO: 4076 - DNA, 20 bp, Artificial Sequence
  spacer sequence
gatgtgtatatcacagacaa

SEQ ID NO: 4077 - DNA, 20 bp, Artificial Sequence
  spacer sequence
ggaataatgctgttgttgaa

SEQ ID NO: 4078 - DNA, 20 bp, Artificial Sequence
  spacer sequence
aaatccagtgacaagtctgt

SEQ ID NO: 4079 - DNA, 20 bp, Artificial Sequence
  spacer sequence
aggccacagcactgttgctc

SEQ ID NO: 4080 - DNA, 20 bp, Artificial Sequence
  spacer sequence
agaagacaccttcttcccca

SEQ ID NO: 4081 - DNA, 20 bp, Artificial Sequence
  spacer sequence
tccccagcccaggtaagggc

SEQ ID NO: 4082 - DNA, 20 bp, Artificial Sequence
  spacer sequence
ccagcccaggtaagggcagc

SEQ ID NO: 4083 - DNA, 20 bp, Artificial Sequence
  spacer sequence
agtccctcaagtccttccag

SEQ ID NO: 4084 - DNA, 20 bp, Artificial Sequence
  spacer sequence
agcagcagcagcagcagcag

SEQ ID NO: 4085 - DNA, 20 bp, Artificial Sequence
  spacer sequence
tcagccgccgccgcaggcac

SEQ ID NO: 4086 - DNA, 20 bp, Artificial Sequence
  spacer sequence
agggtcgccatggcggtctc

SEQ ID NO: 4087 - DNA, 20 bp, Artificial Sequence
  spacer sequence
tcagcttttccagggtcgcc

SEQ ID NO: 4088 - DNA, 20 bp, Artificial Sequence
  spacer sequence
gccgcagccgcccccgccgc

SEQ ID NO: 4089 - DNA, 20 bp, Artificial Sequence
  spacer sequence
gccacagccgggccgggtgg

SEQ ID NO: 4090 - DNA, 20 bp, Artificial Sequence
  spacer sequence
tcagccacagccgggccggg

SEQ ID NO: 4091 - DNA, 20 bp, Artificial Sequence
  spacer sequence
cggtcggtgcagcggctcct

SEQ ID NO: 4092 - DNA, 20 bp, Artificial Sequence
  spacer sequence
ccacaccttcactggtccat

SEQ ID NO: 4093 - DNA, 20 bp, Artificial Sequence
  spacer sequence
taaaggaaagtaatggacca

SEQ ID NO: 4094 - DNA, 20 bp, Artificial Sequence
  spacer sequence
ctggtccattactttccttt

SEQ ID NO: 4095 - DNA, 20 bp, Artificial Sequence
  spacer sequence
atgttcatgagtttggagat

SEQ ID NO: 4096 - DNA, 20 bp, Artificial Sequence
  spacer sequence
tgagtttggagataatacag

SEQ ID NO: 4097 - DNA, 20 bp, Artificial Sequence
  spacer sequence
atagacacatcggccacacc

SEQ ID NO: 4098 - DNA, 20 bp, Artificial Sequence
  spacer sequence
ttattaggcatgttggagac

SEQ ID NO: 4099 - DNA, 20 bp, Artificial Sequence
  spacer sequence
caggagaccattgcatcatt

SEQ ID NO: 4100 - DNA, 20 bp, Artificial Sequence
  spacer sequence
ggcctggaggctatccagcg

SEQ ID NO: 4101 - DNA, 20 bp, Artificial Sequence
  spacer sequence
cgctggatagcctccaggcc

SEQ ID NO: 4102 - DNA, 20 bp, Artificial Sequence
  oSH7 PCR primer
aacacgtccgtcctagaact

SEQ ID NO: 4103 - DNA, 20 bp, Artificial Sequence
  oSH8 PCR primer
acttggttacgctcaacact

SEQ ID NO: 4104 - DNA, 82 bp, Artificial Sequence
  SAH24 primer
ttcaggttggaccggtgccaccatggccccaaagaagaagcggaaggtcagccaagagatcaagagaatcaacaagatcaga

SEQ ID NO: 4105 - DNA, 28 bp, Artificial Sequence
  SAH25 primer
ttttggactagtcacggcgggcttccag

SEQ ID NO: 4106 - DNA, 37 bp, Artificial Sequence
  oIC539 primer
atggccccaaagaagaagcggaaggtctctagacaag

SEQ ID NO: 4107 - DNA, 32 bp, Artificial Sequence
  oIC540 primer
tacctttctcttcttttttggactagtcacgg

SEQ ID NO: 4108 - DNA, 40 bp, Artificial Sequence
  Primer PCR1 Fwd
  misc_feature (34)..(40): n is any nucleotide
acactctttccctacacgacgctcttccgatctnnnnnnn

SEQ ID NO: 4109 - DNA, 34 bp, Artificial Sequence
  Primer PCR2 Rvs
gtgactggagttcagacgtgtgctcttccgatct

SEQ ID NO: 4110 - DNA, 52 bp, Artificial Sequence
  Primer PCR2 Fwd
aatgatacggcgaccaccgagatctacactctttccctacacgacgctcttc

SEQ ID NO: 4111 - DNA, 64 bp, Artificial Sequence
  Primer PCR2_Rvs_v1_001
caagcagaagacggcatacgagatcgtgatgtgactggagttcagacgtgtgctcttccgatct

SEQ ID NO: 4112 - DNA, 64 bp, Artificial Sequence
  Primer PCR2_Rvs_v1_002
caagcagaagacggcatacgagatacatcggtgactggagttcagacgtgtgctcttccgatct

SEQ ID NO: 4113 - DNA, 64 bp, Artificial Sequence
  Primer PCR2_Rvs_v1_003
caagcagaagacggcatacgagatgcctaagtgactggagttcagacgtgtgctcttccgatct

SEQ ID NO: 4114 - DNA, 64 bp, Artificial Sequence
  Primer PCR2_Rvs_v1_004
caagcagaagacggcatacgagattggtcagtgactggagttcagacgtgtgctcttccgatct

SEQ ID NO: 4115 - DNA, 64 bp, Artificial Sequence
  Primer PCR2_Rvs_v1_005
caagcagaagacggcatacgagatcactgtgtgactggagttcagacgtgtgctcttccgatct

SEQ ID NO: 4116 - DNA, 64 bp, Artificial Sequence
  Primer PCR2_Rvs_v1_006
caagcagaagacggcatacgagatattggcgtgactggagttcagacgtgtgctcttccgatct

SEQ ID NO: 4117 - DNA, 64 bp, Artificial Sequence
  Primer PCR2_Rvs_v1_007
caagcagaagacggcatacgagatgatctggtgactggagttcagacgtgtgctcttccgatct

SEQ ID NO: 4118 - DNA, 64 bp, Artificial Sequence
  Primer PCR2_Rvs_v1_008
caagcagaagacggcatacgagattcaagtgtgactggagttcagacgtgtgctcttccgatct

SEQ ID NO: 4119 - DNA, 64 bp, Artificial Sequence
  Primer PCR2_Rvs_v1_009
caagcagaagacggcatacgagatctgatcgtgactggagttcagacgtgtgctcttccgatct

SEQ ID NO: 4120 - DNA, 64 bp, Artificial Sequence
  Primer PCR2_Rvs_v1_010
caagcagaagacggcatacgagataagctagtgactggagttcagacgtgtgctcttccgatct

SEQ ID NO: 4121 - DNA, 64 bp, Artificial Sequence
  Primer PCR2_Rvs_v1_011
caagcagaagacggcatacgagatgtagccgtgactggagttcagacgtgtgctcttccgatct

SEQ ID NO: 4122 - DNA, 64 bp, Artificial Sequence
  Primer PCR2_Rvs_v1_012
caagcagaagacggcatacgagattacaaggtgactggagttcagacgtgtgctcttccgatct

SEQ ID NO: 4123 - DNA, 64 bp, Artificial Sequence
  Primer PCR2_Rvs_v1_013
caagcagaagacggcatacgagatttgactgtgactggagttcagacgtgtgctcttccgatct

SEQ ID NO: 4124 - DNA, 64 bp, Artificial Sequence
  Primer PCR2_Rvs_v1_014
caagcagaagacggcatacgagatggaactgtgactggagttcagacgtgtgctcttccgatct

SEQ ID NO: 4125 - DNA, 64 bp, Artificial Sequence
  Primer PCR2_Rvs_v1_015
caagcagaagacggcatacgagattgacatgtgactggagttcagacgtgtgctcttccgatct

SEQ ID NO: 4126 - DNA, 64 bp, Artificial Sequence
  Primer PCR2_Rvs_v1_016
caagcagaagacggcatacgagatggacgggtgactggagttcagacgtgtgctcttccgatct

SEQ ID NO: 4127 - DNA, 64 bp, Artificial Sequence
  Primer PCR2_Rvs_v1_017
caagcagaagacggcatacgagatctctacgtgactggagttcagacgtgtgctcttccgatct

SEQ ID NO: 4128 - DNA, 64 bp, Artificial Sequence
  Primer PCR2_Rvs_v1_018
caagcagaagacggcatacgagatgcggacgtgactggagttcagacgtgtgctcttccgatct

SEQ ID NO: 4129 - DNA, 64 bp, Artificial Sequence
  Primer PCR2_Rvs_v1_019
caagcagaagacggcatacgagattttcacgtgactggagttcagacgtgtgctcttccgatct

SEQ ID NO: 4130 - DNA, 64 bp, Artificial Sequence
  Primer PCR2_Rvs_v1_020
caagcagaagacggcatacgagatggccacgtgactggagttcagacgtgtgctcttccgatct

SEQ ID NO: 4131 - DNA, 64 bp, Artificial Sequence
  Primer PCR2_Rvs_v1_021
caagcagaagacggcatacgagatcgaaacgtgactggagttcagacgtgtgctcttccgatct

SEQ ID NO: 4132 - DNA, 64 bp, Artificial Sequence
  Primer PCR2_Rvs_v1_022
caagcagaagacggcatacgagatcgtacggtgactggagttcagacgtgtgctcttccgatct

SEQ ID NO: 4133 - DNA, 64 bp, Artificial Sequence
  Primer PCR2_Rvs_v1_023
caagcagaagacggcatacgagatccactcgtgactggagttcagacgtgtgctcttccgatct

SEQ ID NO: 4134 - DNA, 64 bp, Artificial Sequence
  Primer PCR2_Rvs_v1_024
caagcagaagacggcatacgagatgctaccgtgactggagttcagacgtgtgctcttccgatct

SEQ ID NO: 4135 - DNA, 64 bp, Artificial Sequence
  Primer PCR2_Rvs_v1_025
caagcagaagacggcatacgagatatcagtgtgactggagttcagacgtgtgctcttccgatct

SEQ ID NO: 4136 - DNA, 64 bp, Artificial Sequence
  Primer PCR2_Rvs_v1_026
caagcagaagacggcatacgagatgctcatgtgactggagttcagacgtgtgctcttccgatct

SEQ ID NO: 4137 - DNA, 64 bp, Artificial Sequence
  Primer PCR2_Rvs_v1_027
caagcagaagacggcatacgagataggaatgtgactggagttcagacgtgtgctcttccgatct

SEQ ID NO: 4138 - DNA, 64 bp, Artificial Sequence
  Primer PCR2_Rvs_v1_028
caagcagaagacggcatacgagatcttttggtgactggagttcagacgtgtgctcttccgatct

SEQ ID NO: 4139 - DNA, 64 bp, Artificial Sequence
  Primer PCR2_Rvs_v1_029
caagcagaagacggcatacgagattagttggtgactggagttcagacgtgtgctcttccgatct

SEQ ID NO: 4140 - DNA, 64 bp, Artificial Sequence
  Primer PCR2_Rvs_v1_030
caagcagaagacggcatacgagatccggtggtgactggagttcagacgtgtgctcttccgatct

SEQ ID NO: 4141 - DNA, 64 bp, Artificial Sequence
  Primer PCR2_Rvs_v1_031
caagcagaagacggcatacgagatatcgtggtgactggagttcagacgtgtgctcttccgatct

SEQ ID NO: 4142 - DNA, 64 bp, Artificial Sequence
  Primer PCR2_Rvs_v1_032
caagcagaagacggcatacgagattgagtggtgactggagttcagacgtgtgctcttccgatct

SEQ ID NO: 4143 - DNA, 64 bp, Artificial Sequence
  Primer PCR2_Rvs_v1_033
caagcagaagacggcatacgagatcgcctggtgactggagttcagacgtgtgctcttccgatct

SEQ ID NO: 4144 - DNA, 64 bp, Artificial Sequence
  Primer PCR2_Rvs_v1_034
caagcagaagacggcatacgagatgccatggtgactggagttcagacgtgtgctcttccgatct

SEQ ID NO: 4145 - DNA, 64 bp, Artificial Sequence
  Primer PCR2_Rvs_v1_035
caagcagaagacggcatacgagataaaatggtgactggagttcagacgtgtgctcttccgatct

SEQ ID NO: 4146 - DNA, 64 bp, Artificial Sequence
  Primer PCR2_Rvs_v1_036
caagcagaagacggcatacgagattgttgggtgactggagttcagacgtgtgctcttccgatct

SEQ ID NO: 4147 - DNA, 64 bp, Artificial Sequence
  Primer PCR2_Rvs_v1_037
caagcagaagacggcatacgagatattccggtgactggagttcagacgtgtgctcttccgatct

SEQ ID NO: 4148 - DNA, 64 bp, Artificial Sequence
  Primer PCR2_Rvs_v1_038
caagcagaagacggcatacgagatagctaggtgactggagttcagacgtgtgctcttccgatct

SEQ ID NO: 4149 - DNA, 64 bp, Artificial Sequence
  Primer PCR2_Rvs_v1_039
caagcagaagacggcatacgagatgtataggtgactggagttcagacgtgtgctcttccgatct

SEQ ID NO: 4150 - DNA, 64 bp, Artificial Sequence
  Primer PCR2_Rvs_v1_040
caagcagaagacggcatacgagattctgaggtgactggagttcagacgtgtgctcttccgatct

SEQ ID NO: 4151 - DNA, 64 bp, Artificial Sequence
  Primer PCR2_Rvs_v1_041
caagcagaagacggcatacgagatgtcgtcgtgactggagttcagacgtgtgctcttccgatct

SEQ ID NO: 4152 - DNA, 64 bp, Artificial Sequence
  Primer PCR2_Rvs_v1_042
caagcagaagacggcatacgagatcgattagtgactggagttcagacgtgtgctcttccgatct

SEQ ID NO: 4153 - DNA, 64 bp, Artificial Sequence
  Primer PCR2_Rvs_v1_043
caagcagaagacggcatacgagatgctgtagtgactggagttcagacgtgtgctcttccgatct

SEQ ID NO: 4154 - DNA, 64 bp, Artificial Sequence
  Primer PCR2_Rvs_v1_044
caagcagaagacggcatacgagatattatagtgactggagttcagacgtgtgctcttccgatct

SEQ ID NO: 4155 - DNA, 64 bp, Artificial Sequence
  Primer PCR2_Rvs_v1_045
caagcagaagacggcatacgagatgaatgagtgactggagttcagacgtgtgctcttccgatct

SEQ ID NO: 4156 - DNA, 64 bp, Artificial Sequence
  Primer PCR2_Rvs_v1_046
caagcagaagacggcatacgagattcgggagtgactggagttcagacgtgtgctcttccgatct

SEQ ID NO: 4157 - DNA, 64 bp, Artificial Sequence
  Primer PCR2_Rvs_v1_047
caagcagaagacggcatacgagatcttcgagtgactggagttcagacgtgtgctcttccgatct

SEQ ID NO: 4158 - DNA, 64 bp, Artificial Sequence
  Primer PCR2_Rvs_v1_048
caagcagaagacggcatacgagattgccgagtgactggagttcagacgtgtgctcttccgatct

SEQ ID NO: 4159 - DNA, 61 bp, Artificial Sequence
  Primer PCR2_Rvs_v2_001
caagcagaagacggcatacgagataaccgcgggtgactggagttcagacgtgtgctcttcc

SEQ ID NO: 4160 - DNA, 61 bp, Artificial Sequence
  Primer PCR2_Rvs_v2_002
caagcagaagacggcatacgagatggttataagtgactggagttcagacgtgtgctcttcc

SEQ ID NO: 4161 - DNA, 61 bp, Artificial Sequence
  Primer PCR2_Rvs_v2_003
caagcagaagacggcatacgagatccaagtccgtgactggagttcagacgtgtgctcttcc

SEQ ID NO: 4162 - DNA, 61 bp, Artificial Sequence
  Primer PCR2_Rvs_v2_004
caagcagaagacggcatacgagatttggacttgtgactggagttcagacgtgtgctcttcc

SEQ ID NO: 4163 - DNA, 61 bp, Artificial Sequence
  Primer PCR2_Rvs_v2_005
caagcagaagacggcatacgagatcagtggatgtgactggagttcagacgtgtgctcttcc

SEQ ID NO: 4164 - DNA, 61 bp, Artificial Sequence
  Primer PCR2_Rvs_v2_006
caagcagaagacggcatacgagattgacaagcgtgactggagttcagacgtgtgctcttcc

SEQ ID NO: 4165 - DNA, 61 bp, Artificial Sequence
  Primer PCR2_Rvs_v2_007
caagcagaagacggcatacgagatctagcttggtgactggagttcagacgtgtgctcttcc

SEQ ID NO: 4166 - DNA, 61 bp, Artificial Sequence
  Primer PCR2_Rvs_v2_008
caagcagaagacggcatacgagattcgatccagtgactggagttcagacgtgtgctcttcc

SEQ ID NO: 4167 - DNA, 61 bp, Artificial Sequence
  Primer PCR2_Rvs_v2_009
caagcagaagacggcatacgagatcctgaactgtgactggagttcagacgtgtgctcttcc

SEQ ID NO: 4168 - DNA, 61 bp, Artificial Sequence
  Primer PCR2_Rvs_v2_010
caagcagaagacggcatacgagatttcaggtcgtgactggagttcagacgtgtgctcttcc

SEQ ID NO: 4169 - DNA, 61 bp, Artificial Sequence
  Primer PCR2_Rvs_v2_011
caagcagaagacggcatacgagatagtagagagtgactggagttcagacgtgtgctcttcc

SEQ ID NO: 4170 - DNA, 61 bp, Artificial Sequence
  Primer PCR2_Rvs_v2_012
caagcagaagacggcatacgagatgacgagaggtgactggagttcagacgtgtgctcttcc

SEQ ID NO: 4171 - DNA, 61 bp, Artificial Sequence
  Primer PCR2_Rvs_v2_013
caagcagaagacggcatacgagatagacttgggtgactggagttcagacgtgtgctcttcc

SEQ ID NO: 4172 - DNA, 61 bp, Artificial Sequence
  Primer PCR2_Rvs_v2_014
caagcagaagacggcatacgagatgagtccaagtgactggagttcagacgtgtgctcttcc

SEQ ID NO: 4173 - DNA, 61 bp, Artificial Sequence
  Primer PCR2_Rvs_v2_015
caagcagaagacggcatacgagatcttaagccgtgactggagttcagacgtgtgctcttcc

SEQ ID NO: 4174 - DNA, 61 bp, Artificial Sequence
  Primer PCR2_Rvs_v2_016
caagcagaagacggcatacgagattccggattgtgactggagttcagacgtgtgctcttcc

SEQ ID NO: 4175 - DNA, 61 bp, Artificial Sequence
  Primer PCR2_Rvs_v2_017
caagcagaagacggcatacgagatctgtattagtgactggagttcagacgtgtgctcttcc

SEQ ID NO: 4176 - DNA, 61 bp, Artificial Sequence
  Primer PCR2_Rvs_v2_018
caagcagaagacggcatacgagattcacgccggtgactggagttcagacgtgtgctcttcc

SEQ ID NO: 4177 - DNA, 61 bp, Artificial Sequence
  Primer PCR2_Rvs_v2_019
caagcagaagacggcatacgagatacttacatgtgactggagttcagacgtgtgctcttcc

SEQ ID NO: 4178 - DNA, 61 bp, Artificial Sequence
  Primer PCR2_Rvs_v2_020
caagcagaagacggcatacgagatgtccgtgcgtgactggagttcagacgtgtgctcttcc

SEQ ID NO: 4179 - DNA, 61 bp, Artificial Sequence
  Primer PCR2_Rvs_v2_021
caagcagaagacggcatacgagataaggtaccgtgactggagttcagacgtgtgctcttcc

SEQ ID NO: 4180 - DNA, 61 bp, Artificial Sequence
  Primer PCR2_Rvs_v2_022
caagcagaagacggcatacgagatggaacgttgtgactggagttcagacgtgtgctcttcc

SEQ ID NO: 4181 - DNA, 61 bp, Artificial Sequence
  Primer PCR2_Rvs_v2_023
caagcagaagacggcatacgagataattctgcgtgactggagttcagacgtgtgctcttcc

SEQ ID NO: 4182 - DNA, 61 bp, Artificial Sequence
  Primer PCR2_Rvs_v2_024
caagcagaagacggcatacgagatggcctcatgtgactggagttcagacgtgtgctcttcc

SEQ ID NO: 4183 - DNA, 61 bp, Artificial Sequence
  Primer PCR2_Rvs_v2_025
caagcagaagacggcatacgagatatcttagtgtgactggagttcagacgtgtgctcttcc

SEQ ID NO: 4184 - DNA, 61 bp, Artificial Sequence
  Primer PCR2_Rvs_v2_026
caagcagaagacggcatacgagatgctccgacgtgactggagttcagacgtgtgctcttcc

SEQ ID NO: 4185 - DNA, 61 bp, Artificial Sequence
  Primer PCR2_Rvs_v2_027
caagcagaagacggcatacgagatataccaaggtgactggagttcagacgtgtgctcttcc

SEQ ID NO: 4186 - DNA, 61 bp, Artificial Sequence
  Primer PCR2_Rvs_v2_028
caagcagaagacggcatacgagatgcgttggagtgactggagttcagacgtgtgctcttcc

SEQ ID NO: 4187 - DNA, 61 bp, Artificial Sequence
  Primer PCR2_Rvs_v2_029
caagcagaagacggcatacgagatcttcacgggtgactggagttcagacgtgtgctcttcc

SEQ ID NO: 4188 - DNA, 61 bp, Artificial Sequence
  Primer PCR2_Rvs_v2_030
caagcagaagacggcatacgagattcctgtaagtgactggagttcagacgtgtgctcttcc

SEQ ID NO: 4189 - DNA, 61 bp, Artificial Sequence
  Primer PCR2_Rvs_v2_031
caagcagaagacggcatacgagatagaatgccgtgactggagttcagacgtgtgctcttcc

SEQ ID NO: 4190 - DNA, 61 bp, Artificial Sequence
  Primer PCR2_Rvs_v2_032
caagcagaagacggcatacgagatgaggcattgtgactggagttcagacgtgtgctcttcc

SEQ ID NO: 4191 - DNA, 61 bp, Artificial Sequence
  Primer PCR2_Rvs_v2_033
caagcagaagacggcatacgagatcctcggtagtgactggagttcagacgtgtgctcttcc

SEQ ID NO: 4192 - DNA, 61 bp, Artificial Sequence
  Primer PCR2_Rvs_v2_034
caagcagaagacggcatacgagatttctaacggtgactggagttcagacgtgtgctcttcc

SEQ ID NO: 4193 - DNA, 61 bp, Artificial Sequence
  Primer PCR2_Rvs_v2_035
caagcagaagacggcatacgagatatgaggctgtgactggagttcagacgtgtgctcttcc

SEQ ID NO: 4194 - DNA, 61 bp, Artificial Sequence
  Primer PCR2_Rvs_v2_036
caagcagaagacggcatacgagatgcagaatcgtgactggagttcagacgtgtgctcttcc

SEQ ID NO: 4195 - DNA, 61 bp, Artificial Sequence
  Primer PCR2_Rvs_v2_037
caagcagaagacggcatacgagatcactacgagtgactggagttcagacgtgtgctcttcc

SEQ ID NO: 4196 - DNA, 61 bp, Artificial Sequence
  Primer PCR2_Rvs_v2_038
caagcagaagacggcatacgagattgtcgtaggtgactggagttcagacgtgtgctcttcc

SEQ ID NO: 4197 - DNA, 61 bp, Artificial Sequence
  Primer PCR2_Rvs_v2_039
caagcagaagacggcatacgagataccacttagtgactggagttcagacgtgtgctcttcc

SEQ ID NO: 4198 - DNA, 61 bp, Artificial Sequence
  Primer PCR2_Rvs_v2_040
caagcagaagacggcatacgagatgttgtccggtgactggagttcagacgtgtgctcttcc

SEQ ID NO: 4199 - DNA, 61 bp, Artificial Sequence
  Primer PCR2_Rvs_v2_041
caagcagaagacggcatacgagatatccatatgtgactggagttcagacgtgtgctcttcc

SEQ ID NO: 4200 - DNA, 61 bp, Artificial Sequence
  Primer PCR2_Rvs_v2_042
caagcagaagacggcatacgagatgcttgcgcgtgactggagttcagacgtgtgctcttcc

SEQ ID NO: 4201 - DNA, 61 bp, Artificial Sequence
  Primer PCR2_Rvs_v2_043
caagcagaagacggcatacgagatagtatcttgtgactggagttcagacgtgtgctcttcc

SEQ ID NO: 4202 - DNA, 61 bp, Artificial Sequence
  Primer PCR2_Rvs_v2_044
caagcagaagacggcatacgagatgacgctccgtgactggagttcagacgtgtgctcttcc

SEQ ID NO: 4203 - DNA, 61 bp, Artificial Sequence
  Primer PCR2_Rvs_v2_045
caagcagaagacggcatacgagatcatgccatgtgactggagttcagacgtgtgctcttcc

SEQ ID NO: 4204 - DNA, 61 bp, Artificial Sequence
  Primer PCR2_Rvs_v2_046
caagcagaagacggcatacgagattgcattgcgtgactggagttcagacgtgtgctcttcc

SEQ ID NO: 4205 - DNA, 61 bp, Artificial Sequence
  Primer PCR2_Rvs_v2_047
caagcagaagacggcatacgagatattggaacgtgactggagttcagacgtgtgctcttcc

SEQ ID NO: 4206 - DNA, 61 bp, Artificial Sequence
  Primer PCR2_Rvs_v2_048
caagcagaagacggcatacgagatgccaaggtgtgactggagttcagacgtgtgctcttcc

SEQ ID NO: 4207 - DNA, 58 bp, Artificial Sequence
  Primer PCR2_fwd_v1_univ
aatgatacggcgaccaccgagatctacactctttccctacacgacgctcttccgatct

SEQ ID NO: 4208 - DNA, 52 bp, Artificial Sequence; identical to SEQ ID NO: 4110
  Primer PCR2_fwd_v2_univ

SEQ ID NO: 4209 - DNA, 64 bp, Artificial Sequence
  Primer PCR2_fwd_v2_001
aatgatacggcgaccaccgagatctacacagcgctagacactctttccctacacgacgctcttc

SEQ ID NO: 4210 - DNA, 64 bp, Artificial Sequence
  Primer PCR2_fwd_v2_002
aatgatacggcgaccaccgagatctacacgatatcgaacactctttccctacacgacgctcttc

SEQ ID NO: 4211 - DNA, 64 bp, Artificial Sequence
  Primer PCR2_fwd_v2_003
aatgatacggcgaccaccgagatctacaccgcagacgacactctttccctacacgacgctcttc

SEQ ID NO: 4212 - DNA, 64 bp, Artificial Sequence
  Primer PCR2_fwd_v2_004
aatgatacggcgaccaccgagatctacactatgagtaacactctttccctacacgacgctcttc

SEQ ID NO: 4213 - DNA, 64 bp, Artificial Sequence
  Primer PCR2_fwd_v2_005
aatgatacggcgaccaccgagatctacacaggtgcgtacactctttccctacacgacgctcttc

SEQ ID NO: 4214 - DNA, 64 bp, Artificial Sequence
  Primer PCR2_fwd_v2_006
aatgatacggcgaccaccgagatctacacgaacatacacactctttccctacacgacgctcttc

SEQ ID NO: 4215 - DNA, 64 bp, Artificial Sequence
  Primer PCR2_fwd_v2_007
aatgatacggcgaccaccgagatctacacacatagcgacactctttccctacacgacgctcttc

SEQ ID NO: 4216 - DNA, 64 bp, Artificial Sequence
  Primer PCR2_fwd_v2_008
aatgatacggcgaccaccgagatctacacgtgcgataacactctttccctacacgacgctcttc

SEQ ID NO: 4217 - DNA, 64 bp, Artificial Sequence
  Primer PCR2_fwd_v2_009
aatgatacggcgaccaccgagatctacacccaacagaacactctttccctacacgacgctcttc

SEQ ID NO: 4218 - DNA, 64 bp, Artificial Sequence
  Primer PCR2_fwd_v2_010
aatgatacggcgaccaccgagatctacacttggtgagacactctttccctacacgacgctcttc

SEQ ID NO: 4219 - DNA, 64 bp, Artificial Sequence
  Primer PCR2_fwd_v2_011
aatgatacggcgaccaccgagatctacaccgcggttcacactctttccctacacgacgctcttc

SEQ ID NO: 4220 - DNA, 64 bp, Artificial Sequence
  Primer PCR2_fwd_v2_012
aatgatacggcgaccaccgagatctacactataacctacactctttccctacacgacgctcttc

SEQ ID NO: 4221 - DNA, 168 bp, Artificial Sequence
  Planctomyces reference guide scaffold
tgacagctagctcagtcctaggtataatactagttactggcgcttttatctcattactttgagagccatcaccagcgactatgtcgtatgggtaaagcgcttatttatcggagagaaatccgataaataagaagcatcaaagctggagttgtcccaattcttctagag

SEQ ID NO: 4222 - RNA, 20 nt, Artificial Sequence
  spacer sequence
uguggucgggguagcggcug

SEQ ID NO: 4223 - RNA, 20 nt, Artificial Sequence
  spacer sequence
ucaaguccgccaugcccgaa

SEQ ID NO: 4224 - RNA, 20 nt, Artificial Sequence
  spacer sequence
auguucaugaguuuggagau

SEQ ID NO: 4225 - RNA, 20 nt, Artificial Sequence
  spacer sequence
ucgccauaacucgcuaggcc

SEQ ID NO: 4226 - RNA, 29 nt, Artificial Sequence
  extended stem region
gcgcuuacggacuucgguccguaagaagc

SEQ ID NO: 4227 - RNA, 20 nt, Artificial Sequence
  extended stem region
gcucccucuucggagggagc

SEQ ID NO: 4228 - RNA, 27 nt, Artificial Sequence
  extended stem region
gcucacaugaggaucacccaugugagc

SEQ ID NO: 4229 - protein, 978 aa, Artificial Sequence
  CasX variant
MQEIKRINKIRRRLVKDSNTKKAGKTGPMKTLLVRVMTPDLRERLENLRKKPENIPQPISNTSRANLNKLLTDYTEMKKAILHVYWEEFQKDPVGLMSRVAQPAPKNIDQRKLIPVKDGNERLTSSGFACSQCCQPLYVYKLEQVNDKGKPHTNYFGRCNVSEHERLILLSPHKPEANDELVTYSLGKFGQRALDFYSIHVTRESNHPVKPLEQIGGNSCASGPVGKALSDACMGAVASFLTKYQDIILEHQKVIKKNEKRLANLKDIASANGLAFPKITLPPQPHTKEGIEAYNNVVAQIVIWVNLNLWQKLKIGRDEAKPLQRLKGFPSFPLVERQANEVDWWDMVCNVKKLINEKKEDGKVFWQNLAGYKRQEALLPYLSSEEDRKKGKKFARYQFGDLLLHLEKKHGEDWGKVYDEAWERIDKKVEGLSKHIKLEEERRSEDAQSKAALTDWLRAKASFVIEGLKEADKDEFCRCELKLQKWYGDLRGKPFAIEAENSILDISGFSKQYNCAFIWQKDGVKKLNLYLIINYFKGGKLRFKKIKPEAFEANRFYTVINKKSGEIVPMEVNFNFDDPNLIILPLAFGKRQGREFIWNDLLSLETGSLKLANGRVIEKTLYNRRTRQDEPALFVALTFERREVLDSSNIKPMNLIGIDRGENIPAVIALTDPEGCPLSRFKDSLGNPTHILRIGESYKEKQRTIQAAKEVEQRRAGGYSRKYASKAKNLADDMVRNTARDLLYYAVTQDAMLIFENLSRGFGRQGKRTFMAERQYTRMEDWLTAKLAYEGLPSKTYLSKTLAQYTSKTCSNCGFTITSADYDRVLEKLKKTATGWMTTINGKELKVEGQITYYNRYKRQNVVKDLGVELDRLSEESVNNDISSWTKGRSGEALSLLKKRFSHRPVQEKFVCLNCGFETHADEQAALNIARSWLFLRSQEYKKYQTNKTTGNTDKRAFVETWQSFYRKKLKEVWKPAV

SEQ ID NO: 4230 - protein, 986 aa, Artificial Sequence; identical to SEQ ID NO: 259
  CasX variant

SEQ ID NO: 4231 - protein, 978 aa, Artificial Sequence
  CasX variant
MQEIKRINKIRRRLVKDSNTKKAGKTGPMKTLLVRVMTPDLRERLENLRKKPENIPQPISNTSRANLNKLLTDYTEMKKAILHVYWEEFQKDPVGLMSRVAQPAPKNIDQRKLIPVKDGNERLTSSGFACSQCCQPLYVYKLEQVNDKGKPHTNYFGRCNVSEHERLILLSPHKPEANDELVTYSLGKFGQRALDFYSIHVTRESNHPVKPLEQIGGNSCASGPVGKALSDACMGAVASFLTKYQDIILEHQKVIKKNEKRLANLKDIASANGLAFPKITLPPQPHTKEGIEAYNNVVAQIVIWVNLNLWQKLKIGRDEAKPLQRLKGFPSFPLVERQANEVDWWDMVCNVKKLINEKKEDGKVFWQNLAGYKRQEALRPYLSSEEDRKKGKKFARYQFGDLLLHLEKKHGEDWGKVYDEAWERIDKKVEGLSKHIKLEEERRSEDAQSKAALTDWLRAKASFVIEGLKEADKDEFCRCELKLQKWYGDLRGKPFAIEAENSILDISGFSKQYNCAFIWQKDGVKKLNLYLIINYFKGGKLRFKKIKPEAFEANRFYTVINKKSGEIVPMEVNFNFDDPNLIILPLAFGKRQGREFIWNDLLSLETGSLKLANGRVIEKTLYNRRTRQDEPALFVALTFERREVLDSSNIKPVNLIGVDRGENIPAVIALTDPEGCPLPEFKDSSGGPTDILRIGEGYKEKQRAIQAAKEVEQRRAGGYSRKFASKSRNLADDMVRNSARDLFYHAVTHDAVLVFENLSRGFGRQGKRTFMTERQYTKMEDWLTAKLAYEGLTSKTYLSKTLAQYTSKTCSNCGFTITSADYDRVLEKLKKTATGWMTTINGKELKVEGQITYYNRYKRQNVVKDLSVELDRLSEESVNNDISSWTKGRSGEALSLLKKRFSHRPVQEKFVCLNCGFETHADEQAALNIARSWLFLRSQEYKKYQTNKTTGNTDKRAFVETWQSFYRKKLKEVWKPAV

SEQ ID NO: 4232 - protein, 972 aa, Artificial Sequence
  CasX variant
MQEIKRINKIRRRLVKDSNTKKAGKTGPMKTLLVRVMTPDLRERLENLRKKPENIPQPISNTSRANLNKLLTDYTEMKKAILHVYWEEFQKDPVGLMSRVAQPAPKNIDQRKLIPVKDGNERLTSSGFACSQCCQPLYVYKLEQVNDKGKPHTNYFGRCNVSEHERLILLSPHKPEANDELVTYSLGKFGQRALDFYSIHVTRESNHPVKPLEQIGGNSCASGPVGKALSDACMGAVASFLTKYQDIILEHQKVIKKNEKRLANLKDIASANGLAFPKITLPPQPHTKEGIEAYNNVVAQIVIWVNLNLWQKLKIGRDEAKPLQRLKGFPSFPLVERQANEVDWWDMVCNVKKLINEKKEDGKVFWQNLAGYKRQEALRPYLSSEEDRKKGKKFARYQFGDLLLHLEKKHGEDWGKVYDEAWERIDKKVEGLSKHIKLEEERRSEDAQSKAALTDWLRAKASFVIEGLKEADKDEFCRCELKLQKWYGDLRGKPFAIEAENSILDISGFSKQYNCAFIWQKDGVKKLNLYLIINYFKGGKLRFKKIKPEAFEANRFYTVINKKSGEIVPMEVNFNFDDPNLIILPLAFGKRQGREFIWNDLLSLETGSLKLANGRVIEKTLYNRRTRQDEPALFVALTFERREVLDSSNIKPMNLIGIDRGENIPAVIALTDPEGCPLSRFKDSLGNPTHILRIGESYKEKQRTIQAKKEVEQRRAGGYSRKYASKAKNLADDMVRNTARDLLYYAVTQDAMLIFENLSRGFGRQGKRTFMAERQYTRMEDWLTAKLAYEGLSKTYLSKTLAQYTSKTCSNCGFTITSADYDRVLEKLKKTATGWMTTINGKELKVEGQITYYNRYKRQNVVKDLSVELDRLSEESVNNDISSWTKGRSGEALSLLKKRFSHRPVQEKFVCLNCGFETHADEQAALNIARSWLFLNSNSTEFKSYKSGKQPFVGAWQAFYKRRLKEVWKPNA

1. A method of selecting an improved biomolecule variant, wherein the biomolecule variant is a protein, RNA, or DNA, comprising:
(i) constructing a library comprising a plurality of biomolecule variants;
wherein each variant is independently a variant of the same reference biomolecule, wherein each variant comprises an alteration of one or more monomer locations of the reference biomolecule, wherein the monomer is an amino acid of the protein or a ribonucleotide of the RNA or a deoxyribonucleotide of the DNA,
wherein each alteration of a monomer location is independently selected from the group consisting of substitution of the monomer, deletion of one or more consecutive monomers beginning at the location, and insertion of one or more consecutive monomers adjacent to the location; and
wherein the library represents variants comprising alteration of one or more locations for at least 1% of the monomer locations of the reference biomolecule;
(ii) screening the library of (i);
(iii) identifying at least a portion of the library of (i) that exhibits one or more improved characteristics compared to the reference biomolecule; and
(iv) selecting the improved biomolecule variant from the at least a portion of the library, wherein the improved biomolecule variant exhibits one or more improved characteristics compared to the reference biomolecule.

2. The method of claim 1, further comprising screening the portion of the library identified in step (iii).

3-4. (canceled)

5. A method of selecting an improved biomolecule variant, wherein the biomolecule is a protein, RNA, or DNA, comprising:
(i) constructing a library comprising a plurality of biomolecule variants;
wherein each variant is independently a variant of the same reference biomolecule, wherein each variant comprises an alteration of one or more monomer locations of the reference biomolecule, wherein the monomer is an amino acid of the protein or ribonucleotide of the RNA or deoxyribonucleotide of the DNA,
wherein each alteration of a monomer location is independently selected from the group consisting of substitution of the monomer, deletion of one or more consecutive monomers beginning at the location, and insertion of one or more consecutive monomers adjacent to the location; and
wherein the library represents variants comprising alteration of one or more locations of at least 5%, at least 10%, at least 30%, at least 70%, or at least 90% of the monomer locations of the reference biomolecule;
(ii) screening the library of (i);
(iii) identifying at least a portion of the library of (i) that exhibits one or more improved characteristics compared to the reference biomolecule;
(iv) carrying out one or more additional rounds of library construction and screening to produce a final library, wherein construction of each library comprises:
altering one or more additional monomer locations of the identified portion of the previous library to produce a subsequent library of biomolecule variants;
(v) selecting the improved biomolecule variant from the final library of biomolecule variants, wherein the improved biomolecule variant exhibits one or more improved characteristics compared to the reference biomolecule.

6. The method of claim 1, wherein the library in step (i) comprises biomolecule variants with a single alteration of a single monomer location, biomolecule variants with a single alteration of two monomer locations, and biomolecule variants with a single alteration of three monomer locations, wherein each alteration is independently selected from the group consisting of substitution of the monomer, deletion of one or more consecutive monomers beginning at the location, and insertion of one or more consecutive monomers adjacent to the location.

7-16. (canceled)

17. The method of claim 1, wherein the reference biomolecule is a CRISPR associated protein selected from the group consisting of CasX, CasY, Cas9, Cas12a, Cas12b, Cas12c, Cas12f, Cas12g, Cas12h, Cas12i, Cas12j, Cas13a, Cas13b, Cas13c, Cas13d, Cas14, CASCADE, CSM, and CSY.

18.-19. (canceled)

20. The method of claim 17, wherein the one or more improved characteristics are independently selected from the group consisting of improved folding of the variant, improved binding affinity to the guide RNA, improved binding affinity to a target DNA, altered binding affinity to one or more PAM sequences, improved unwinding of a target DNA, increased activity, improved editing efficiency, improved editing specificity, increased activity of the nuclease, increased target strand loading for double strand cleavage, decreased target strand loading for single strand nicking, decreased off-target cleavage, decreased off-target binding/nicking, improved binding of the non-target strand of a DNA, improved protein stability, improved protein:guide-RNA complex stability, improved protein solubility, improved protein:guide NA complex stability, improved protein yield, increased collateral activity, and decreased collateral activity.

21. (canceled)

22. The method of claim 1, wherein the reference biomolecule is a CRISPR guide RNA that binds to CasX, CasY, Cas9, Cas12a, Cas12b, Cas12c, Cas12f, Cas12g, Cas12h, Cas12i, Cas12j, Cas13a, Cas13b, Cas13c, Cas13d, Cas14, CASCADE, CSM, or CSY.

23. (canceled)

24. The method of claim 22, wherein the one or more improved characteristics are independently selected from the group consisting of improved stability, improved solubility, improved resistance to nuclease activity, improved binding affinity to a reference CRISPR associated protein, improved binding affinity to a target DNA, improved gene editing, and improved specificity.

25-30. (canceled)

31. A method of constructing a library of polynucleotide variants of a reference biomolecule, comprising:
(a) constructing a polynucleotide that encodes for a variant of the reference biomolecule, wherein the reference biomolecule is a protein or RNA or DNA;
wherein the polynucleotide encodes for an alteration of one or more monomer locations of the reference biomolecule, wherein the monomer is an amino acid of the protein or ribonucleotide of the RNA or the deoxyribonucleotide of the DNA, and
wherein each alteration of a monomer location is independently selected from the group consisting of substitution of the monomer, deletion of one or more consecutive monomers beginning at the location, and insertion of one or more consecutive monomers adjacent to the location; and
(b) repeating the polynucleotide construction of (a) a sufficient number of times such that the library of polynucleotide represents variants comprising a single alteration of a single location for at least of at least 5%, at least 10%, at least 30%, at least 70%, or at least 90%1% of the monomer locations of the biomolecule.

32-42. (canceled)

43. The method of claim 31, wherein the reference biomolecule is a protein, and wherein substitution of the monomer comprises replacing the monomer with one of the nineteen other naturally occurring amino acids.

44-46. (canceled)

47. The method of claim 31, wherein the reference biomolecule is an RNA, and wherein substitution of the monomer comprises replacing the monomer with one of the three other naturally occurring ribonucleotides.

48-53. (canceled)

54. The method of claim 31 wherein the reference biomolecule is a CRISPR associated protein selected from the group consisting of CasX, CasY, Cas9, Cas12a, Cas12b, Cas12c, Cas12f, Cas12g, Cas12h, Cas12i, Cas12j, Cas13a, Cas13b, Cas13c, Cas13d, Cas14, CASCADE, CSM, and CSY.

55-60. (canceled)

61. The method of claim 31 wherein the reference biomolecule is a CRISPR guide RNA wherein the CRISPR guide RNA is a guide RNA that binds to CasX, CasY, Cas9, Cas12a, Cas12b, Cas12c, Cas12f, Cas12g, Cas12h, Cas12i, Cas12j, Cas13a, Cas13b, Cas13c, Cas13d, Cas14, CASCADE, CSM, or CSY.

62-64. (canceled)

65. A polynucleotide variant library, comprising polynucleotide variants of a reference biomolecule, comprising:
a plurality of polynucleotides that independently encode for a variant of the reference biomolecule, wherein the reference biomolecule is a protein or RNA or DNA;
wherein each polynucleotide independently encodes an alteration of one or more monomer locations of the reference biomolecule, wherein the monomer is an amino acid of the protein or ribonucleotide of the RNA or deoxyribonucleotide of the DNA, and
wherein each alteration of a monomer location is independently selected from the group consisting of substitution of the monomer, deletion of one or more consecutive monomers beginning at the location, and insertion of one or more consecutive monomers adjacent to the location; and
wherein the library of polynucleotides represents variants comprising a single alteration of a single location of at least 5%, at least 10%, at least 30%, at least 70%, or at least 90% for at least 1% of the monomer locations.

66-76. (canceled)

77. The polynucleotide variant library of claim 65, wherein the reference biomolecule is a protein, and wherein substitution of the monomer comprises replacing the monomer with one of the nineteen other naturally occurring amino acids.

78-81. (canceled)

82. The polynucleotide variant library of claim 65, wherein the reference biomolecule is an RNA, and wherein substitution of the monomer comprises replacing the monomer with one of the three other naturally occurring ribonucleotides.

83-86. (canceled)

87. The polynucleotide variant library of claim 65, wherein the reference biomolecule is a CRISPR associated protein, and wherein the CRISPR associated protein is CasX, CasY, Cas9, Cas12a, Cas12b, Cas12c, Cas12f, Cas12g, Cas12h, Cas12i, Cas12j, Cas13a, Cas13b, Cas13c, Cas13d, Cas14, CASCADE, CSM, or CSY.

88-93. (canceled)

94. The polynucleotide variant library of claim 65, wherein the reference biomolecule is a CRISPR guide RNA, and wherein the CRISPR guide RNA is a guide RNA that binds to CasX, CasY, Cas9, Cas12a, Cas12b, Cas12c, Cas12f, Cas12g, Cas12h, Cas12i, Cas12j, Cas13a, Cas13b, Cas13c, Cas13d, Cas14, CASCADE, CSM, or CSY.

95-110. (canceled)

111. A library of variant oligonucleotides, wherein:
each variant oligonucleotide independently encodes an alteration of one or more sequential monomer locations of a reference biomolecule, wherein:
the reference biomolecule is a protein, RNA, or DNA,
the one or more monomers are one or more amino acids of the protein or ribonucleotides of the RNA or one or more deoxyribonucleotides of DNA, and
wherein each alteration of a monomer location is independently selected from the group consisting of substitution of the monomer, deletion of one or more consecutive monomers beginning at the location, and insertion of one or more consecutive monomers adjacent to the location;
each variant oligonucleotide comprises a pair of homology arms flanking the encoded alteration, wherein the homology arms are homologous to the reference biomolecule sequences flanking the corresponding monomer location alteration, and wherein each homology arm independently comprises between 10 to 100 nucleotides; and
the library of variant oligonucleotides represents alteration of a single monomer for at least 80% of monomer locations.

112. The library of variant oligonucleotides of claim 111, wherein each variant oligonucleotide independently encodes an alteration of one or more monomer locations of the reference biomolecule.

113. A library comprising a plurality of RNA variants, wherein each variant is independently a variant of the same reference RNA, and each variant comprises a point mutation, deletion, or insertion at one ribonucleotide location of the reference RNA sequence; wherein the library represents variants comprising the single alteration of a single location, for at least 5%, at least 10%, at least 30%, at least 70%, or at least 90% 1% of the ribonucleotide locations of the reference RNA sequence.

114-116. (canceled)

117. The library of claim 113, wherein the reference RNA is a CRISPR guide RNA, and wherein the CRISPR guide RNA binds to CasX, CasY, Cas9, Cas12a, Cas12b, Cas12c, Cas12f, Cas12g, Cas12h, Cas12i, Cas12j, Cas13a, Cas13b, Cas13c, Cas13d, Cas14, CASCADE, CSM, or CSY.

118-120. (canceled)

121. A library comprising a plurality of protein variants, wherein each variant is independently a variant of the same reference protein, and each variant comprises an amino acid substitution, deletion, or insertion at one amino acid location of the reference protein sequence; wherein the library represents variants comprising the single alteration of a single location, for at least 5%, at least 10%, at least 30%, at least 70%, or at least 90% 1% of the amino acids of the reference protein sequence.

122-124. (canceled)

125. The library of 121, wherein the reference protein is a CRISPR associated protein, and wherein the CRISPR associated protein is CasX, CasY, Cas9, Cas12a, Cas12b, Cas12c, Cas12f, Cas12g, Cas12h, Cas12i, Cas12j, Cas13a, Cas13b, Cas13c, Cas13d, Cas14, CASCADE, CSM, or CSY.

126-131. (canceled)

132. A library comprising a plurality of DNA variants, wherein each variant is independently a variant of the same reference DNA, and each variant comprises a point mutation, deletion, or insertion at one deoxyribonucleotide location of the reference DNA sequence; wherein the library represents variants comprising the single alteration of a single location, for at least 5%, at least 10%, at least 30%, at least 70%, or at least 90% of the deoxyribonucleotide locations of the reference DNA sequence.

133-135. (canceled)
